(19) United States
(12) Patent Application Publication
(10) Pub. No.: US 2024/0316122 A1
(43) Pub. Date: Sep. 26, 2024

(54) METHODS OF TREATING CANCER USING RECOMBINANT MICROORGANISMS EXPRESSING A STING AGONIST

(71) Applicant: Synlogic Operating Company, Inc., Cambridge, MA (US)

(72) Inventors: Anna Sokolovska, Somerville, MA (US); Aoife Brennan, Dover, MA (US)

(21) Appl. No.: 18/271,714

(22) PCT Filed: Jan. 11, 2022
(86) PCT No.: PCT/US2022/012030

§ 371 Date: Jul. 11, 2023

Related U.S. Application Data
(60) Provisional application No. 63/277,213, filed on Nov. 9, 2021.
(60) Provisional application No. 63/173,661, filed on Apr. 12, 2021.
(60) Provisional application No. 63/166,503, filed on Mar. 26, 2021.
(60) Provisional application No. 63/135,934, filed on Jan. 11, 2021.

(51) Int. Cl. A61K 35/741; A61K 39/00; A61K 39/395; C07K 16/28; C12N 1/20; C12N 9/48; C12R 1/19

(52) U.S. Cl. CPC A61K 35/741; A61K 39/3955; C07K 16/2827; C12N 1/205; C12N 9/485; C12Y 304/16004; A61K 2039/505; A61K 2039/545; C12R 2001/19

(57) ABSTRACT

Therapies comprising a recombinant microorganism expressing a STING agonist, and methods of modulating and treating cancers are disclosed.

### RELATED APPLICATIONS

[0001] The instant application claims priority to U.S. Provisional Application No. 63/277,213, filed on Nov. 9, 2021; U.S. Provisional Application No. 63/173,661, filed Apr. 12, 2021; U.S. Provisional Application No. 63/166,503, filed Mar. 26, 2021; and U.S. Provisional Application No. 63/135,934, filed Jan. 11, 2021, entire contents of each of which are expressly incorporated by reference herein in their entireties.

### SEQUENCE LISTING

[0002] The instant application contains a Sequence Listing which has been submitted electronically in ASCII format and is hereby incorporated by reference in its entirety. Said ASCII copy, created on Jan. 3, 2022 is named 126046-06020_SL.txt and is 1,796,837 bytes in size.

### BACKGROUND

[0003] Current cancer therapies typically employ the use of immunotherapy, surgery, chemotherapy, radiation therapy, or some combination thereof (American Cancer Society). While these drugs have shown great benefits to cancer patients, many cancers remain difficult to treat using conventional therapies. Currently, many conventional cancer therapies are administered systemically and adversely affect healthy tissues, resulting in significant side effects. For example, many cancer therapies focus on activating the immune system to boost the patient's anti-tumor response (Kong et al., 2014). However, despite such therapies, the microenvironment surrounding tumors remains highly immune suppressive. In addition, systemic altered immunoregulation provokes immune dysfunction, including the onset of opportunistic autoimmune disorders and immune-related adverse events.

[0004] Major efforts have been made over the past few decades to develop cytotoxic drugs that specifically target cancer cells. In recent years there has been a paradigm shift in oncology in which the clinical problem of cancer is considered not only to be the accumulation of genetic abnormalities in cancer cells but also the tolerance of these abnormal cells by the immune system. Consequently, recent anti-cancer therapies have been designed specifically to target the immune system rather than cancer cells. Such therapies aim to reverse the cancer immunotolerance and stimulate an effective antitumor immune response. For example, current immunotherapies include immunostimulatory molecules that are pattern recognition receptor (PRR) agonists or immunostimulatory monoclonal antibodies that target various immune cell populations that infiltrate the tumor microenvironment. However, despite their immune-targeted design, these therapies have been developed clinically as if they were conventional anticancer drugs, relying on systemic administration of the immunotherapeutic (e.g., intravenous infusions every 2-3 weeks). As a result, many current immunotherapies suffer from toxicity due to a high dosage requirement and also often result in an undesired autoimmune response or other immune-related adverse events.

[0005] Thus, there is an unmet need for effective cancer therapies that are able to target poorly vascularized, hypoxic tumor regions specifically target cancerous cells, while minimally affecting normal tissues and boost the immune systems to fight the tumors, including avoiding or reversing the cancer immunotolerance.

### SUMMARY

[0006] The present disclosure is based on a first-in-human clinical trial data and provides compositions, methods, and uses of a bacterium that selectively targets tumors and tumor cells and achieves specific immune modulation results in human subjects. The use of the bacterium is safe and provides targeted and local delivery of therapeutic compositions.

[0007] Specifically, the present disclosure provides a method of treating a human subject with cancer, by administering to the human subject a recombinant microorganism capable of expressing a stimulator of interferon gene (STING) agonist. In one embodiment, a level of one or more interferon-stimulated genes, one or more T cell function genes, one or more chemokine genes, one or more cytokine genes, and/or one or more serum cytokines are upregulated in the human subject after administration, as compared to a control level of the one or more interferon-stimulated genes, one or more T cell function genes, one or more chemokine genes, one or more cytokine genes, and/or one or more serum cytokines.

[0008] In some embodiments, the one or more interferon-stimulated genes are selected from the group consisting of ISG15, IFIT1, and IFIT2. In some embodiments, the one or more T cell function genes are selected from the group consisting of GZMA, CD4, CD8, and PD-L2. In some embodiments, the one or more chemokines and/or cytokine genes are selected from the group consisting of CXCL9, CXCL10, TNFRS1B, and TNFSF10.

[0009] In some embodiments, the level of the one or more interferon-stimulated genes, one or more T cell function genes, one or more chemokine genes, and/or one or more cytokine genes in the subject after administration is upregulated by about 2-fold, about 3-fold, or about 4-fold, as compared to the control level.

[0010] In some embodiments, the one or more serum cytokines are selected from the group consisting of IL-6, TNFα, IFNγ, and IL-1Ra.

[0011] In some embodiments, the level of the one or more serum cytokines is about 2-fold, about 5-fold, about 10-fold, or about 20-fold higher than the control level of the one or more serum cytokines.

[0012] In some embodiments, the control level is (i) a level of the one or more interferon-stimulated genes, one or more T cell function genes, one or more chemokine genes, one or more cytokine genes, and/or one or more serum cytokines in the human subject prior to administration, or (ii) a level of the one or more interferon-stimulated genes, one or more T cell function genes, one or more chemokine genes, one or more cytokine genes, and/or one or more serum cytokines in a control human subject or population of control human subjects who has not been administered the recombinant microorganism. In one embodiment, the control subject or population of control human subjects have cancer or a tumor.

[0013] In some embodiments, the recombinant microorganism is administered to the subject at a suitable dose. In some embodiments, the recombinant microorganism is administered to the subject at a dose of about 1×10⁶, about 3×10⁶, about 1×10⁷, about 3×10⁷, about 1×10⁸, about 3×10⁸, or about 1×10⁹ live cells. In some embodiments, the suitable dose may be selected from about 1×10⁶ to about 3×10⁶, from about 3×10⁶ to about 1×10⁷, from about 1×10⁷ to about 3×10⁷, from about 3×10⁷ to about 1×10⁸, from about 1×10⁸ to about 3×10⁸, and from about 3×10⁸ to about 1×10⁹ live cells.

[0014] In some embodiments, the recombinant microorganism is administered to a subject once weekly, once every two weeks, or once every three weeks. In some embodiments, the recombinant microorganism is administered to a subject once weekly. In some embodiments, the recombinant microorganism is administered to a subject once every three weeks.

[0015] In one embodiment, the recombinant microorganism is administered for at least 3 weeks, at least 6 weeks, at least 2 months, at least 4 months, at least 6 months, at least 8 months, at least 10 months, at least 12 months, at least 14 months, at least 16 months, at least 18 months, at least 20 months, at least 22 months, or at least 24 months. In one embodiment, the recombinant microorganism is administered for at least 24 months.

[0016] In some embodiments, the cancer is melanoma, liposarcoma, sarcoma, small cell lung cancer, squamous cell carcinoma, or chondrosarcoma.

[0017] In some embodiments, the method further comprises administering an additional therapeutic agent. In one embodiment, the additional therapeutic agent is an anti-PD1 antibody or an anti-PDL1 antibody. In some embodiments, the anti-PDL1 antibody is atezolizumab.

[0018] In some embodiments, the STING agonist is c-diAMP, c-GAMP, or c-diGMP. In some embodiments, the STING agonist is c-diAMP.

[0019] In some embodiments, the recombinant microorganism expresses at least one non-native gene sequence encoding an enzyme capable of producing the STING agonist.

[0020] In some embodiments, the at least one non-native gene sequence is dacA or cGAS. In one embodiment, the dacA sequence has at least 90%, at least 91%, at least 92%, at least 93%, at least 94%, at least 95%, at least 96%, at least 97%, at least 98%, at least 99% identity to, comprises, or consists of SEQ ID NO: 1210. In one embodiment the dacA gene sequence encodes a protein that comprises a sequence that has at least 90%, at least 91%, at least 92%, at least 93%, at least 94%, at least 95%, at least 96%, at least 97%, at least 98%, at least 99% identity to, comprises, or consists of SEQ ID NO: 1209.

[0021] In some embodiments, the at least one non-native gene sequence is integrated into a chromosome of the microorganism or is present on a plasmid in the microorganism.

[0022] In some embodiments, the at least one non-native gene sequence encoding the enzyme capable of producing the STING agonist is operably linked to an inducible promoter or a constitutive promoter. In some embodiments, the at least one non-native gene sequence encoding the enzyme capable of producing the STING agonist is operably linked to an inducible promoter. In some embodiments, the at least one non-native gene sequence encoding the enzyme capable of producing the STING agonist is operably linked to a constitutive promoter. In one embodiment, the non-native gene sequence is operably linked to an inducible promoter and has at least 90%, at least 91%, at least 92%, at least 93%, at least 94%, at least 95%, at least 96%, at least 97%, at least 98%, at least 99% identity to, comprises, or consists of SEQ ID NO: 1284.

[0023] In some embodiments, inducible promoter is induced by low-oxygen or anaerobic conditions, by the hypoxic environment of a tumor, or temperature.

[0024] In some embodiments, the recombinant microorganism further comprises one or more auxotrophies. In some embodiments, the recombinant microorganism is an auxotroph in dapA, thyA, or both dapA and thyA. In one embodiment, the recombinant microorganism further comprises one or more phage deletions.

[0025] In some embodiments, the recombinant microorganism is non-pathogenic to the subject. In some embodiments, the recombinant microorganism is a recombinant bacteria. In some embodiments, the recombinant microorganism is E. coli. In some embodiments, the recombinant microorganism is Escherichia coli Nissle.

[0026] In some embodiments, the method further comprises selecting a subject who would benefit from an increase in the level of the one or more interferon-stimulated genes, one or more T cell function genes, one or more chemokine genes, one or more cytokine genes, and/or one or more serum cytokines.

[0027] In some embodiments, method further comprises isolating a sample from the subject after administration and measuring the level of the one or more interferon-stimulated genes, one or more T cell function genes, one or more chemokine genes, one or more cytokine genes, and/or one or more serum cytokines.

[0028] In some embodiments, the method further comprises isolating a sample from the subject prior to administration and measuring the level of the one or more interferon-stimulated genes, one or more T cell function genes, one or more chemokine genes, one or more cytokine genes, and/or one or more serum cytokines.

[0029] In some embodiments, the sample is a tumor biopsy and/or a serum sample.

[0030] In some embodiments, the administering is intratumoral injection.

[0031] In another aspect, the present disclosure provides a method of increasing the number of T cells present in a tumor or a cancer in a human subject, the method comprising administering to the human subject a recombinant microorganism capable of expressing a stimulator of interferon gene (STING) agonist, wherein the number of T cells present in the tumor or cancer is increased by at least about 25%, about 50%, about 75%, about 100%, about 1.5-fold, about 2-fold, about 2.5-fold or about 3-fold after administration of the recombinant microorganism as compared to a number of T cells present in the tumor or cancer prior to administration of the recombinant microorganism.

[0032] In one embodiment, the T cells present in the tumor after administration are CD4+, CD8+, CD11c+/MHCII+, CD11c+/PD-L1+, CD4+/Ki67+, CD8+/Ki67+, CD8+/GrnzB+, CD11c+/CD8+/MHCII+, CD11c+, MHCII+, PD-LI+, or a combination thereof.

[0033] In one embodiments, the recombinant microorganism is administered to the subject at a suitable dose. In one embodiment, the recombinant microorganism is administered to the subject at a dose of about 1×10⁶, about 3×10⁶, about 1×10⁷, about 3×10⁷, about 1×10⁸, about 3×10⁸, or about 1×10′ live cells. In one embodiment, the recombinant microorganism is administered to the subject at a dose of about 1×10⁶ to about 3×10⁶, from about 3×10⁶ to about 1×10⁷, from about 1×10⁷ to about 3×10⁷, from about 3×10⁷ to about 1×10⁸, from about 1×10⁸ to about 3×10⁸, or from about 3×10⁸ to about 1×10⁹ live cells. In one embodiment, the recombinant microorganism is administered to the subject once weekly, once every two weeks, or once every three weeks. In one embodiment, the recombinant microorganism is administered to the subject once weekly. In one embodiment, the recombinant microorganism is administered to the subject once every three weeks.

[0034] In one embodiment, the recombinant microorganism is administered for at least 3 weeks, at least 6 weeks, at least 2 months, at least 4 months, at least 6 months, at least 8 months, at least 10 months, at least 12 months, at least 14 months, at least 16 months, at least 18 months, at least 20 months, at least 22 months, or at least 24 months. In one embodiment, the recombinant microorganism is administered for at least 24 months. In one embodiment, the recombinant microorganism is administered for 6 weeks to 3 months, 6 weeks to 6 months, 6 weeks to 1 year, 6 weeks to 18 months, or 6 weeks to 2 years.

[0035] In one embodiment, wherein the STING agonist is c-diAMP, c-GAMP, or c-diGMP. In one embodiment, the recombinant microorganism expresses at least one non-native gene sequence encoding an enzyme capable of producing the STING agonist. In one embodiment, the at least one non-native gene sequence is dacA or cGAS.

[0036] In one embodiment, the cancer or tumor is melanoma, liposarcoma, sarcoma, small cell lung cancer, squamous cell carcinoma, or chondrosarcoma. In one embodiment, the tumor or cancer is stable or regressing after administration.

[0037] In another aspect, the present disclosure provides a method of treating a human subject having a tumor or a cancer, the method comprising: selecting a human subject that would benefit from an increase in the number of T cells present in the tumor, and administering to the human subject a recombinant microorganism capable of expressing a stimulator of interferon gene (STING) agonist, wherein the number of T cells present in the tumor is increased by at least about 25%, about 50%, about 75%, about 100%, about 1.5-fold, about 2-fold, about 2.5-fold or about 3-fold after administration of the recombinant microorganism as compared to a number of T cells present in the tumor prior to administration of the recombinant microorganism.

[0038] In one embodiment, the T cells present in the tumor after administration are CD4+, CD8+, CD11c+/MHCII+, CD11c+/PD-L1+, CD4+/Ki67+, CD8+/Ki67+, CD8+/GrnzB+, CD11c+/CD8+/MHCII+, CD11c+, MHCII+, PD-LI+, or a combination thereof.

[0039] In one embodiments, the recombinant microorganism is administered to the subject at a suitable dose. In one embodiment, the recombinant microorganism is administered to the subject at a dose of about 1×10⁶, about 3×10⁶, about 1×10⁷, about 3×10⁷, about 1×10⁸, about 3×10⁸, or about 1×10′ live cells. In one embodiment, the recombinant microorganism is administered to the subject at a dose of about 1×10⁶ to about 3×10⁶, from about 3×10⁶ to about 1×10⁷, from about 1×10⁷ to about 3×10⁷, from about 3×10⁷ to about 1×10⁸, from about 1×10⁸ to about 3×10⁸, or from about 3×10⁸ to about 1×10⁹ live cells. In one embodiment, the recombinant microorganism is administered to the subject once weekly, once every two weeks, or once every three weeks. In one embodiment, the recombinant microorganism is administered to the subject once weekly. In one embodiment, the recombinant microorganism is administered to the subject once every three weeks.

[0040] In one embodiment, the recombinant microorganism is administered for at least 3 weeks, at least 6 weeks, at least 2 months, at least 4 months, at least 6 months, at least 8 months, at least 10 months, at least 12 months, at least 14 months, at least 16 months, at least 18 months, at least 20 months, at least 22 months, or at least 24 months. In one embodiment, the recombinant microorganism is administered for at least 24 months. In one embodiment, the recombinant microorganism is administered for 6 weeks to 3 months, 6 weeks to 6 months, 6 weeks to 1 year, 6 weeks to 18 months, or 6 weeks to 2 years.

[0041] In one embodiment, wherein the STING agonist is c-diAMP, c-GAMP, or c-diGMP. In one embodiment, the recombinant microorganism expresses at least one non-native gene sequence encoding an enzyme capable of producing the STING agonist. In one embodiment, the at least one non-native gene sequence is dacA or cGAS.

[0042] In one embodiment, the cancer or tumor is melanoma, liposarcoma, sarcoma, small cell lung cancer, squamous cell carcinoma, or chondrosarcoma.

[0043] In one embodiment, the tumor or cancer is stable or regressing after administration.

[0044] In another aspect, the present disclosure provides a method of increasing survival of a human subject suffering from cancer or having a tumor, the method comprising administering to the human subject a recombinant microorganism capable of expressing a stimulator of interferon gene (STING) agonist, wherein the number of T cells present in the tumor or cancer is increased by at least about 25%, about 50%, about 75%, about 100%, about 1.5-fold, about 2-fold, about 2.5-fold or about 3-fold after administration of the recombinant microorganism as compared to a number of T cells present in the tumor or cancer prior to administration of the recombinant microorganism, wherein the cancer and/or tumor is stable or regressing after administration.

[0045] In one embodiment, the T cells present in the tumor after administration are CD4+, CD8+, CD11c+/MHCII+, CD11c+/PD-L1+, CD4+/Ki67+, CD8+/Ki67+, CD8+/GrnzB+, CD11c+/CD8+/MHCII+, CD11c+, MHCII+, PD-LI+, or a combination thereof.

[0046] In one embodiments, the recombinant microorganism is administered to the subject at a suitable dose. In one embodiment, the recombinant microorganism is administered to the subject at a dose of about 1×10⁶, about 3×10⁶, about 1×10⁷, about 3×10⁷, about 1×10⁸, about 3×10⁸, or about 1×10′ live cells. In one embodiment, the recombinant microorganism is administered to the subject at a dose of about 1×10⁶ to about 3×10⁶, from about 3×10⁶ to about 1×10⁷, from about 1×10⁷ to about 3×10⁷, from about 3×10⁷ to about 1×10⁸, from about 1×10⁸ to about 3×10⁸, or from about 3×10⁸ to about 1×10⁹ live cells. In one embodiment, the recombinant microorganism is administered to the subject once weekly, once every two weeks, or once every three weeks. In one embodiment, the recombinant microorganism is administered to the subject once weekly. In one embodiment, the recombinant microorganism is administered to the subject once every three weeks.

[0047] In one embodiment, the recombinant microorganism is administered for at least 3 weeks, at least 6 weeks, at least 2 months, at least 4 months, at least 6 months, at least 8 months, at least 10 months, at least 12 months, at least 14 months, at least 16 months, at least 18 months, at least 20 months, at least 22 months, or at least 24 months. In one embodiment, the recombinant microorganism is administered for at least 24 months. In one embodiment, the recombinant microorganism is administered for 6 weeks to 3 months, 6 weeks to 6 months, 6 weeks to 1 year, 6 weeks to 18 months, or 6 weeks to 2 years.

[0048] In one embodiment, wherein the STING agonist is c-diAMP, c-GAMP, or c-diGMP. In one embodiment, the recombinant microorganism expresses at least one non-native gene sequence encoding an enzyme capable of producing the STING agonist. In one embodiment, the at least one non-native gene sequence is dacA or cGAS.

[0049] In one embodiment, the cancer or tumor is melanoma, liposarcoma, sarcoma, small cell lung cancer, squamous cell carcinoma, or chondrosarcoma.

[0050] In one embodiment, the tumor responds to treatment resulting in a decrease of at least 5%, at least 10%, at least 20%, at least 25%, or at least 30% of a Response Evaluation Criteria in Solid Tumours (RECIST) when compared to the RECIST prior to treatment. In one embodiment, the RECIST decreases at least 5%, at least 6%, at least 7%, at least 8%, at least 9%, at least 10%, at least 11%, at least 12%, at least 13%, at least 14%, at least 15%, at least 16%, at least 17%, at least 18%, at least 19%, at least 20%, at least 21%, at least 22%, at least 23%, at least 24%, at least 25%, at least 26%, at least 27%, at least 28%, at least 29%, or at least 30% when compared to the RECIST prior to treatment.

[0051] In one embodiment, the method further comprising administering an additional therapeutic agent, optionally wherein the additional therapeutic agent is an anti-PD1 antibody or an anti-PDL1 antibody. In one embodiment, the anti-PDL1 antibody is atezolizumab.

[0052] In any of the above embodiments, the microorganism may be SYNB1891. In one embodiment, SYNB1891 comprises the genotype ΔthyA-ΔdapA-ΔΦ-P_{furS}-dacA.

### BRIEF DESCRIPTION OF THE FIGURES

[0053] FIG. 1A depicts IL-6 levels in the blood pre-injection and 6 hr and 24 hr after intratumoral injection of SYNB1891 at doses 1×10⁶, 3×10⁶, and 1×10⁷ live cells.

[0054] FIG. 1B depicts TNF-α levels in the blood pre-injection and 6 hr and 24 hr after intratumoral injection of SYNB1891 at doses 1×10⁶, 3×10⁶, and 1×10⁷ live cells.

[0055] FIG. 1C depicts IFNγ levels in the blood pre-injection and 6 hr and 24 hr after intratumoral injection of SYNB1891 at doses 1×10⁶, 3×10⁶, and 1×10⁷ live cells.

[0056] FIG. 1D depicts IL-1Ra levels in the blood pre-injection and 6 hr and 24 hr after intratumoral injection of SYNB1891 at doses 1×10⁶, 3×10⁶, and 1×10⁷ live cells.

[0057] FIG. 2A depicts a heatmap of gene expression in treated tumors. Fold change over baseline. Tumors were injected with SYNB1891 at doses 1×10⁶, 3×10⁶, and 1×10⁷ live cells. Baseline tumor at day 1, injected tumor a day 22 with 3 doses. 100-002: melanoma; 200-003: liposarcoma; 200-004: sarcoma; 600-002: small cell lung cancer; 100-600: squamous cell carcinoma; 100-005: chondrosarcoma.

[0058] FIG. 2B depicts fold change of gene expression in FIG. 2A.

[0059] FIG. 3A depicts a heatmap of expression of chemokine genes in treated tumors. Fold change over baseline. Tumors treated as in FIG. 2A.

[0060] FIG. 3B depicts a heatmap of expression of cytokine genes in treated tumors. Fold change over baseline. Tumors treated as in FIG. 2A.

[0061] FIG. 3C depicts a heatmap of expression of T cell function genes in treated tumors. Fold change over baseline. Tumors treated as in FIG. 2A.

[0062] FIG. 4A depicts five most upregulated genes across six patients in categories: interferon-stimulated genes (ISGs), chemokines, cytokines, TLRs (innate immunity), and T cell function. Fold change over baseline.

[0063] FIG. 4B depicts most upregulated genes across six patients in ISGs, chemokines and cytokines, and T cell functions. Fold change over baseline.

[0064] FIG. 5A depicts sum of measurements and percent change over the progression of 12 cycles of treatment with 1×10⁶ cells. Patient 100-002 (metastatic melanoma previously treated with Nivolumab) showed stable disease at 7 months followed by progressive disease.

[0065] FIG. 5B depicts heat map of expression of interferon-stimulated genes, cytokine/chemokine genes, and T cell function genes in treated tumor of the patient from FIG. 5A.

[0066] FIG. 6A depicts sum of measurements and percent change over the progression of 10 cycles of treatment with 1×10⁷ cells. Patient 600-002 (small cell lung cancer previously treated with Pembrolizumab) showed stable disease at 4.5 months.

[0067] FIG. 6B depicts heat map of expression of interferon-stimulated genes, antigen processing genes, and T cell function genes in treated tumor of the patient from FIG. 6A.

[0068] FIGS. 7A-7H depict multiplex immunofluorescence staining (IF) for tumor cores. Patient 100-002 (vulvar melanoma): baseline (FIG. 7A); SYNB1891 (FIG. 7B); patient 600-002 (small cell lung cancer); baseline (FIG. 7C); SYNB1891 (FIG. 7D); patient 200-003 (liposarcoma); baseline (FIG. 7E); SYNB1891 (FIG. 7F); and patient 100-005 (chondrosarcoma of the bone): baseline (FIG. 7G); SYNB1891 (FIG. 7H). DAPI (nucleus) in blue, CD4+ cells in green, CD8+ cells in red.

[0069] FIG. 8A depicts a heat map of marker positive cells in T cell compartment and APC compartment in a tumor.

[0070] FIG. 8B depicts a heat map of cell phenotype in T cell compartment and APC compartment in a tumor.

[0071] FIGS. 9A-9K depict quantification of cells with specific marker in a tumor area based on multiplex immunofluorescence staining (e.g., FIGS. 7A-7H). CD4+ cells (FIG. 9A), CD8+ cells (FIG. 9B), CD11c/MHCII+ cells (FIG. 9C), CD11c/PDL-1+ cells (FIG. 9D), CD4+/Ki67+ cells (FIG. 9E), CD8+/Ki67+ cells (FIG. 9F), CD8+/GrnzB+ cells (FIG. 9G), CD11c+/CD8+/MHCII+ cells (FIG. 9H), CD11c+ cells (FIG. 9I), MHCII+ cells (FIG. 9J), and PD-LI+ cells (FIG. 9K).

[0072] FIG. 10 graphically depicts the SYNB1891 strain. Abbreviations: ΔΦ=deletion of the prophage sequence endogenous to E. coli Nissle; ATP=adenosine triphosphate; dacA or DacA=diadenylate cyclase gene or enzyme; ΔdapA=deletion of dapA gene leading to diaminopimelate auxotrophy; LPS=lipopolysaccharide or endotoxin; Pfnrs=fumarate and nitrate reductase regulator promoter; ΔthyA=deletion of thyA gene leading to thymidine auxotrophy.

[0073] FIG. 11 depicts a summary of the Phase I clinical trial design including ARM 1, monotherapy, and ARM 2, combination with atezolizumab.

[0074] FIGS. 12A, 12B, 12C, and 12D depict serum cytokine levels in patients at baseline, 6 hours, and 24 hours after injection of SYNB1891 at 1×10⁶, 3×10⁶, 1×10⁷, 3×10⁸, 1×10⁸, and 3×10⁸ live cells. Cytokines IL-6 (FIG. 12A), TNFα (FIG. 12B), IFNγ (FIG. 12C), and IL-1RA were measured.

[0075] FIG. 13A depicts baseline gene expression levels across different tumor types. Data were normalized to the highest and lowest expressed gene in each row. The majority of injected tumors had low levels of inflammatory gene expression.

[0076] FIG. 13B depicts fold change in gene expression over baseline in injected tumors. Fold changes in gene expression after one cycle of SYNB1819 treatment relative to baseline samples as determined by Nanostring.

[0077] FIG. 14 depicts change from baseline in gene expression for the 5 most upregulated genes across 5 different gene categories. Data are shown for the same 12 patients depicted in FIGS. 13A and 13B. Each symbol depicts the data for a single patient. ISG=interferon stimulated genes.

### DETAILED DESCRIPTION

[0078] Certain tumors are particularly difficult to manage using conventional therapies. Hypoxia is a characteristic feature of solid tumors, wherein cancerous cells are present at very low oxygen concentrations. Regions of hypoxia often surround necrotic tissues and develop as solid forms of cancer outgrow their vasculature. When the vascular supply is unable to meet the metabolic demands of the tumor, the tumor's microenvironment becomes oxygen deficient. Multiple areas within tumors contain <1% oxygen, compared to 3-15% oxygen in normal tissues (Vaupel and Hockel, 1995), and avascular regions may constitute 25-75% of the tumor mass (Dang et al., 2001). Approximately 95% of tumors are hypoxic to some degree (Huang et al., 2004). Systemically delivered anticancer agents rely on tumor vasculature for delivery, however, poor vascularization impedes the oxygen supply to rapidly dividing cells, rendering them less sensitive to therapeutics targeting cellular proliferation in poorly vascularized, hypoxic tumor regions. Radiotherapy fails to kill hypoxic cells because oxygen is a required effector of radiation-induced cell death. Hypoxic cells are up to three times more resistant to radiation therapy than cells with normal oxygen levels (Bettegowda et al., 2003; Tiecher, 1995; Wachsberger et al., 2003). For all of these reasons, nonresectable, locally advanced tumors are particularly difficult to manage using conventional therapies.

[0079] In addition to the challenges associated with targeting a hypoxic environment, therapies that specifically target and destroy cancers must recognize differences between normal and malignant tissues, including genetic alterations and pathophysiological changes that lead to heterogeneous masses with areas of hypoxia and necrosis.

[0080] The disclosure relates to microorganisms, e.g., bacteria, pharmaceutical compositions thereof, and methods of modulating or treating cancer. In certain embodiments, the bacteria are delivered locally to the tumor cells. In certain embodiments, the bacteria are capable of targeting cancerous cells. In certain embodiments, the bacteria are capable of targeting cancerous cells, particularly in low-oxygen conditions, such as in hypoxic tumor environments.

[0081] This disclosure relates to compositions and therapeutic methods for the local and tumor-specific delivery of immune modulators in order to treat cancers. In certain aspects, the disclosure relates to microorganisms that are capable of targeting cancerous cells and, in some embodiments, the microorganism is administered in combination with one or more effector molecules e.g., immune modulators, such as any of the effector molecules provided herein. In contrast to existing conventional therapies, the hypoxic areas of tumors offer a perfect niche for the growth of anaerobic bacteria, the use of which offers an opportunity for eradication of advanced local tumors in a precise manner, sparing surrounding well-vascularized, normoxic tissue.

[0082] In some aspects, the disclosure provides delivery of a microorganism to tumor cells or the tumor microenvironment. In some aspects, the disclosure relates to a microorganism that is delivered locally, e.g., via local intra-tumoral administration, in combination with one or more effector molecules, e.g., immune initiators and/or immune sustainers. In some aspects, the compositions and methods disclosed herein may be used to deliver one or more effector molecules, e.g., immune initiators and/or immune sustainers selectively to tumor cells, thereby reducing systemic cytotoxicity or systemic immune dysfunction, e.g., the onset of an autoimmune event or other immune-related adverse event.

[0083] In order that the disclosure may be more readily understood, certain terms are first defined. These definitions should be read in light of the remainder of the disclosure and as understood by a person of ordinary skill in the art. Unless defined otherwise, all technical and scientific terms used herein have the same meaning as commonly understood by a person of ordinary skill in the art. Additional definitions are set forth throughout the detailed description.

[0084] The generation of immunity to cancer is a potentially self-propagating cyclic process which has been referred to as the “Cancer-Immunity Cycle” (Chen and Mellman, Oncology Meets Immunology: The Cancer-Immunity Cycle; Immunity (2013) 39:1-10), and which can lead to the broadening and amplification of the T cell response. The cycle is counteracted by inhibitory factors that lead to immune regulatory feedback mechanisms at various steps of the cycle and which can halt the development or limit the immunity.

[0085] The cycle essentially comprises a series of steps which need to occur for an anticancer immune response to be successfully mounted. The cycle includes steps, which must occur for the immune response to be initiated and a second series of events which must occur subsequently, in order for the immune response to be sustained (i.e., allowed to progress and expand and not dampened). These steps have been referred to as the “Cancer-Immunity Cycle” (Chen and Mellman, 2013), and are essentially as follows:
[0086] 1. Release (oncolysis) and/or acquisition of tumor cell contents; Tumor cells break open and spill their contents, resulting in the release of neoantigens, which are taken up by antigen presenting cells (dendritic cells and macrophages for processing). Alternatively, antigen presenting cells may actively phagocytose tumors cells directly.
[0087] 2. Activation of antigen presenting cells (APC) (dendritic cells and macrophages); In addition to the first step described above, the next step must involve release of proinflammatory cytokines or generation of proinflammatory cytokines as a result of release of DAMPs or PAMPs from the dying tumor cells to result in antigen presenting cell activation and subsequently an anticancer T cell response. Antigen presenting cell activation is critical to avoid peripheral tolerance to tumor derived antigens. If properly activated, antigen presenting cells present the previously internalized antigens on their surface in the context of MHCI and MHCII molecules alongside the proper co-stimulatory signals (CD80/86, cytokines, etc.) to prime and activate T cells.
[0088] 3. Priming and Activation of T cells: Antigen presentation by DCs and macrophages causes the priming and activation of effector T cell responses against the cancer-specific antigens, which are seen as “foreign” by the immune system. This step is critical to the strength and breadth of the anti-cancer immune response, by determining quantity and quality of T effector cells and contribution of T regulatory cells. Additionally, proper priming of T cells can result in superior memory T cell formation and long lived immunity.
[0089] 4. Trafficking and Infiltration: Next, the activated effector T cells must traffic to the tumor and infiltrate the tumor.
[0090] 5. Recognition of cancer cells by T cells and T cell support, and augmentation and expansion of effector T cell responses: Once arrived at the tumor site, the T cells can recognize and bind to cancer cells via their T cell receptors (TCR), which specifically bind to their cognate antigen presented within the context of MHC molecules on the cancer cells, and subsequently kill the target cancer cell. Killing of the cancer cell releases tumor associated antigens through lysis of tumor cells, and the cycle re-initiates, thereby increasing the volume of the response in subsequent rounds of the cycle. Antigen recognition by either MHC-I or MHC-II restricted T cells can result in additional effector functions, such as the release of chemokines and effector cytokines, further potentiating a robust antitumor response.
[0091] 6. Overcoming immune suppression: Finally, overcoming certain deficiencies in the immune response to the cancer and/or overcoming the defense strategy of the cancer, i.e., overcoming the breaks that the cancer employs in fighting the immune response, can be viewed as another critical step in the cycle. In some cases, even though T cell priming and activation has occurred, other immunosuppressive cell subsets are actively recruited and activated to the tumor microenvironment, i.e., regulatory T cells or myeloid derived suppressor cells. In other cases, T cells may not receive the right signals to properly home to tumors or may be actively excluded from infiltrating the tumor. Finally, certain mechanisms in the tumor microenvironment exist, which are capable of suppressing or repressing the effector cells that are produced as a result of the cycle. Such resistance mechanisms co-opt immune-inhibitory pathways, often referred to as immune checkpoints, which normally mediate immune tolerance and mitigate cancer tissue damage (see e.g., Pardoll (2012), The blockade of immune checkpoints in cancer immunotherapy; Nature Reviews Cancer volume 12, pages 252-264).

[0092] One important immune-checkpoint receptor is cytotoxic T-lymphocyte-associated antigen 4 (CTLA4), which down modulates the amplitude of T cell activation. Some immune-checkpoint receptors, such as programmed cell death protein 1 (PD1), limit T cell effector functions within tissues. By upregulating ligands for PD1, tumor cells and antigen presenting cells block antitumor immune responses in the tumor microenvironment. Multiple additional immune-checkpoint receptors and ligands, some of which are selectively upregulated in various types of tumor cells, are prime targets for blockade, particularly in combination with approaches that enhance the initiation or activation of antitumor immune responses.

[0093] Therapies have been developed to promote and support progression through the cancer-immunity cycle at one or more of the 6 steps. These therapies can be broadly classified as therapies that promote initiation of the immune response and therapies that help sustain the immune response.

[0094] As used herein the term “immune initiation” or “initiating the immune response” refers to advancement through the steps which lead to the generation and establishment of an immune response. For example, these steps could include the first three steps of the cancer immunity cycle described above, i.e., the process of antigen acquisition (step (1)), activation of dendritic cells and macrophages (step (2)), and/or the priming and activation of T cells (step (3)).

[0095] As used herein the term “immune sustenance” or “sustaining the immune response” refers to the advancement through steps which ensure the immune response is broadened and strengthened over time and which prevent dampening or suppression of the immune response. For example, these steps could include steps 4 through 6 of the cycle described, i.e., T cell trafficking and tumor infiltration, recognition of cancer cells though TCRs, and overcoming immune suppression, i.e., depletion or inhibition of T regulatory cells and preventing the establishment of other active suppression of the effector response.

[0096] Accordingly, in some embodiments, the compositions are capable of modulating, e.g., advancing the cancer immunity cycle by modulating, e.g., activating, promoting supporting, one or more of the steps in the cycle. In some embodiments, the compositions are capable of modulating, e.g., promoting, steps that modulate, e.g., intensify, the initiation of the immune response. In some embodiments, the compositions are capable of modulating, e.g., boosting, certain steps within the cycle that enhance sustenance of the immune response. In some embodiments, the compositions are capable of modulating, e.g., intensifying, the initiation of the immune response and modulating, e.g., enhancing, sustenance of the immune response.

[0097] Accordingly, in some embodiments, the one or more effector molecules, e.g., immune modulators, modulate, e.g., intensify the initiation of the immune response. Accordingly, in some embodiments, the one or more effector molecules, e.g., immune modulators, modulate, e.g., enhance, sustenance of the immune response. Accordingly, in some embodiments, the one or more effector molecules, e.g., immune modulators, modulate, e.g., intensify, the initiation of the immune response and the one or more one or more effector molecules, e.g., immune modulators, modulate, e.g., enhance, sustenance of the immune response.

[0098] An “effector”, “effector substance” or “effector molecule” refers to one or more molecules, therapeutic substances, or drugs of interest. In one embodiment, the “effector” is administered in combination with a microorganism, e.g., bacteria, and administered before, at the same time as, or after, the administration of the microorganism. In another embodiment, a microorganism described herein is administered in combination with at least two effectors and administered before, at the same time as, or after, the administration of the microorganism.

[0099] A non-limiting example of such effector or effector molecules are “immune modulators,” which include immune sustainers and/or immune initiators as described herein. In some embodiments, the composition comprises two or more effector molecules or immune modulators. In some embodiments, the composition comprises three, four, five, six, seven, eight, nine, or ten effector molecules or immune modulators. In some embodiments, the effector molecule or immune modulator is a therapeutic molecule that is useful for modulating or treating a cancer.

[0100] In some embodiments, the effector or immune modulator is a therapeutic molecule. In some embodiments, the effector molecule or immune modulator may be a nucleic acid molecule that mediates RNA interference, microRNA response or inhibition, TLR response, antisense gene regulation, target protein binding (aptamer or decoy oligos), or gene editing, such as CRISPR interference. Other types of effectors and immune modulators are described and listed herein.

[0101] Non-limiting examples of effector molecules and/or immune modulators include immune checkpoint inhibitors (e.g., CTLA-4 antibodies, PD-1 antibodies, PDL-1 antibodies), cytotoxic agents (e.g., Cly A, FASL, TRAIL, TNFα), immunostimulatory cytokines and co-stimulatory molecules (e.g., OX40 antibody or OX40L, CD28, ICOS, CCL21, IL-2, IL-18, IL-15, IL-12, IFN-gamma, IL-21, TNFs, GM-CSF), antigens and antibodies (e.g., tumor antigens, neoantigens, CtxB-PSA fusion protein, CPV-OmpA fusion protein, NY-ESO-1 tumor antigen, RAF1, antibodies against immune suppressor molecules, anti-VEGF, Anti-CXR4/CXCL12, anti-GLP1, anti-GLP2, anti-galectini, anti-galectin3, anti-Tie2, anti-CD47, antibodies against immune checkpoints, antibodies against immunosuppressive cytokines and chemokines), DNA transfer vectors (e.g., endostatin, thrombospondin-1, TRAIL, SMAC, Stat3, Bcl2, FLT3L, GM-CSF, IL-12, AFP, VEGFR2), and enzymes (e.g., E. coli CD, HSV-TK), immune stimulatory metabolites and biosynthetic pathway enzymes that produce them (STING agonists, e.g., c-di-AMP, 3′3′-cGAMP, and 2′3′-cGAMP; arginine, tryptophan).

[0102] Effectors may also include enzymes or other polypeptides (such as transporters or regulatory proteins) or other modifications (such as inactivation of certain endogenous genes, e.g., auxotrophies), which result in catabolism of immune suppressive or tumor growth promoting metabolites, such as kynurenine, adenosine and ammonia.

[0103] Immune modulators include, inter alia, immune initiators and immune sustainers.

[0104] As used herein, the term “immune initiator” or “initiator” refers to a class of effectors or molecules, e.g., immune modulators, or substances. Immune initiators may modulate, e.g., intensify or enhance, one or more steps of the cancer immunity cycle, including (1) lysis of tumor cells (oncolysis); (2) activation of APCs (dendritic cells and macrophages); and/or (3) priming and activation of T cells. In one embodiment, an immune initiator may be administered in combination with a microorganism of the disclosure. For example, a microorganism described herein is administered in combination with at least one immune initiator but administered before, at the same time as, or after, the administration of the microorganism. In other embodiments, a microorganism described herein is administered in combination with at least one immune initiator and at least one immune sustainer, but administered before, at the same time as, or after, the administration of the microorganism. Non-limiting examples of such immune initiators are described in further detail herein.

[0105] In some embodiments, an immune initiator is a therapeutic molecule. Non-limiting examples of such therapeutic molecules are described herein and include, but are not limited to, cytokines, chemokines, single chain antibodies (agonistic or antagonistic), ligands (agonistic or antagonistic), co-stimulatory receptors/ligands and the like. In another embodiment, an immune initiator is a STING agonist. In another embodiment, an immune initiator is arginine. In another embodiment, an immune initiator is at least one enzyme of a catabolic pathway. Non-limiting examples of such catabolic pathways are described herein and include, but are not limited to, enzymes involved in the catabolism of a harmful metabolite. In another embodiment, an immune initiator is at least one molecule produced by at least one enzyme of a biosynthetic pathway. In another embodiment, an immune initiator is a metabolic converter. In other embodiments, the immune initiator may be a nucleic acid molecule that mediates RNA interference, microRNA response or inhibition, TLR response, antisense gene regulation, target protein binding (aptamer or decoy oligos), gene editing, such as CRISPR interference.

[0106] In specific embodiments, the one or more immune initiators, modulate, e.g., intensify, one or more of steps (1) lysis of tumor cells and/or uptake of tumor antigens, (2), activation of APCs and/or (3) priming and activation of T cells. In some embodiments, the one or more immune initiators modulate, e.g., intensify, one or more of steps (1) lysis of tumor cells and/or uptake of tumor antigens, (2) activation of APCs and/or (3) priming and activation of T cells. In some embodiments, the one or more immune initiators, modulate, e.g., intensify, one or more of steps (1) oncolysis and/or uptake of tumor antigens, (2) activation of APCs and/or (3) priming and activation of T cells. Any immune initiator may be combined with one or more additional same or different immune initiator(s), which modulate the same or a different step in the cancer immunity cycle.

[0107] In one embodiment, the one or more immune initiators which modulate oncolysis or tumor antigen uptake (step (1)). Non-limiting examples of immune initiators which modulate antigen acquisition are described herein and known in the art and include but are not limited to lytic peptides, CD47 blocking antibodies, SIRP-alpha and variants, TNFα, IFN-γ and 5FU. In one embodiment, the one or more immune initiators which modulate activation of APCs (step (2)). Non-limiting examples of immune initiators modulate activation of APCs are described herein and known in the art and include but are not limited to Toll-like receptor agonists, STING agonists, CD40L, and GM-CSF. In one embodiment, the one or more immune initiators modulate, e.g., enhance, priming and activation of T cells (step (3)). Non-limiting examples of immune initiators which modulate, e.g., enhance, priming and activation of T cells are described herein and known in the art and include but are not limited to an anti-OX40 antibody, OXO40L, an anti-41BB antibody, 41BBL, an anti-GITR antibody, GITRL, anti-CD28 antibody, anti-CTLA4 antibody, anti-PD1 antibody, anti-PDL1 antibody, IL-15, and IL-12, etc.

[0108] As used herein the term “immune sustainer” or “sustainer” refers to a class of effectors or molecules, e.g., immune modulators, or substances. Immune sustainers may modulate, e.g., boost or enhance, one or more steps of the cancer immunity cycle, including (4) trafficking and infiltration; (5) recognition of cancer cells by T cells and T cell support; and/or (6) the ability to overcome immune suppression. In one embodiment, the immune sustainer may be administered in combination with a microorganism described herein. For example, a microorganism described herein is administered in combination with an immune sustainer but administered before, at the same time as, or after, the administration of the microorganism and/or the immune sustainer.

[0109] In some embodiments, the immune sustainer is a therapeutic molecule. Non-limiting examples of such therapeutic molecules are described herein and include cytokines, chemokines, single chain antibodies (agonistic or antagonistic), ligands (agonistic or antagonistic), and the like. In another embodiment, an immune sustainer is a therapeutic molecule produced by an enzyme. Non-limiting examples of such enzymes are described herein. In another embodiment, an immune sustainer is at least one enzyme of a biosynthetic pathway or a catabolic pathway. Non-limiting examples of such biosynthetic pathways are described herein and include, but are not limited to, enzymes involved in the production of arginine; and non-limiting examples of such catabolic pathways are described herein and include, but are not limited to, enzymes involved in the catalysis of kynurenine or enzymes involved in the catalysis of adenosine. In another embodiment, an immune sustainer is a metabolic converter. In other embodiments, the immune sustainer may be a nucleic acid molecule that mediates RNA interference, microRNA response or inhibition, TLR response, antisense gene regulation, target protein binding (aptamer or decoy oligos), gene editing, such as CRISPR interference.

[0110] In specific embodiments, the term “immune sustainer” may also refer to the reduction or elimination of a harmful molecule. In such instances, the term “immune sustainer” may also be used to refer to the one or more enzymes of the catabolic pathway which breaks down the harmful metabolite.

[0111] In some embodiments, the one or more immune sustainers modulate, e.g., boost, one or more of steps (4) T cell trafficking and infiltration, (5) recognition of cancer cells by T cells and/or T cell support and/or (6) the ability to overcome immune suppression. Any immune sustainer may be combined with one or more additional immune sustainer(s), which modulate the same or a different step. In some embodiments, the one or more immune sustainers, modulate, e.g., boost, one or more of steps (4) T cell trafficking and infiltration, (5) recognition of cancer cells by T cells and/or T cell support and/or (6) the ability to overcome immune suppression. In some embodiments, the one or more immune sustainers modulate, e.g., boost, one or more of steps (4) T cell trafficking and infiltration, (5) recognition of cancer cells by T cells and/or T cell support and/or (6) the ability to overcome immune suppression.

[0112] In one embodiment, the one or more immune sustainers modulate T cell trafficking and infiltration (step (4)). Non-limiting examples of immune sustainers which modulate T cell trafficking and infiltration are described herein and known in the art and include, but are not limited to, chemokines such as CXCL9 and CXCL10 or upstream activators which induce the expression of such cytokines. In one embodiment, the one or more immune sustainers modulate recognition of cancer cells by T cells and T cell support (step (5)). Non-limiting examples of immune sustainers which modulate recognition of cancer cells by T cells and T cell support are described herein and known in the art and include, but are not limited to, anti-PD1/PD-L1 antibodies (antagonistic), anti-CTLA-4 antibodies (antagonistic), kynurenine consumption, adenosine consumption, anti-OX40 antibodies (agonistic), anti-41BB antibodies (agonistic), and anti-GITR antibodies (agonistic). In one embodiment, the one or more immune sustainers modulate, e.g., enhance, the ability to overcome immune suppression (step (6)). Non-limiting examples of immune sustainers which modulate, e.g., enhance, the ability to overcome immune suppression are described herein and known in the art and include, but are not limited to, IL-15 and IL-12 and variants thereof.

[0113] Any one or more immune initiator(s) may be combined any one or more immune sustainer(s). Accordingly, in some embodiments, the one or more immune initiators modulate, e.g., intensify, one or more of steps (1) oncolysis, (2) activation of APCs and/or (3) priming and activation of T cells in combination with one or more immune sustainers, which modulate, e.g., boost, one or more of steps (4) T cell trafficking and infiltration, (5) recognition of cancer cells by T cells and/or T cell support and/or (6) the ability to overcome immune suppression.

[0114] In some embodiments, certain immune modulators act at multiple stages of the cancer immunity cycle, e.g., one or more stages of immune initiation, or one or more of immune sustenance, or at one or more stages of immune initiation and at one or more stages of immune sustenance.

[0115] As used herein a “metabolic conversion” refers to a chemical transformation which is the result of an enzyme-catalyzed reaction. The enzyme-catalyze reaction can be either biosynthetic or catabolic in nature.

[0116] As used herein, the term “metabolic converter” refers to one or more enzymes, which catalyze a chemical transformation, i.e., which consume, produce or convert a metabolite. In some embodiments, the term “metabolic converter” refers to the at least one molecule produced by the at least one enzyme of a biosynthetic pathway. A metabolic converter can consume a toxic or immunosuppressive metabolite or produce an anti-cancer metabolite, or both. Non-limiting examples of metabolic converters include kynurenine consumers, adenosine consumers, arginine producers and/or ammonia consumers, i.e., enzymes for the consumption of kynurenine or adenosine or for the production of arginine and/or consumption of ammonia. In one embodiment, a metabolic converter can be, for example, a human kynureninase enzyme (for example, EC 3.7.1.3). In another embodiment, a metabolic converter can be a nucleic acid, e.g., RNAi molecule (siRNA, miRNA, dsRNA), mRNA, antisense molecule, aptamer, or CRISPR/Cas 9 molecule, that increases or decreases endogenous expression of an enzyme(s) that catalyzes a chemical transformation, i.e., which consume, produce or convert a metabolite, in a tumor.

[0117] As used herein “wild-type” refers to an unmodified bacteria. For example, a wild-type bacteria has not been modified using genetic engineering. A wild-type bacteria, for example, has not been modified to express a non-native gene or to comprise an auxotrophy. In one embodiment, a wild-type bacteria is an E. coli Nissle bacteria.

[0118] A “bacteria chassis” or “chassis,” as used herein, refers to a bacteria that may comprise an auxotrophic modification, e.g., a mutation or deletion in dapA, thyA, or both, and/or deletion of a phage, and may stimulate an innate immune response; but the bacteria is not modified to comprise a non-native nucleic acid or gene or to express a non-native protein. In other words, a bacteria chassis refers to a bacteria that has not been modified to comprise a non-native immune modulator gene or to express a non-native immune modulator protein. In some embodiments, a chassis refers to a strain of Escherichia coli Nissle bacteria that may comprise an auxotrophic modification, e.g., a mutation or deletion in dapA, thyA, or both, and may stimulate an innate immune response, but is not modified to comprise a non-native gene or to express a non-native protein, e.g., has not been modified to comprise a non-native immune modulator nucleic acid or gene or to express a non-native immune modulator protein.

[0119] As used herein, “non-native” refers to a nucleic acid or a protein not normally present in a microorganism, e.g., an extra copy of an endogenous sequence, or a heterologous sequence such as a sequence from a different species, strain, or substrain of bacteria or virus, or a sequence that is modified and/or mutated as compared to the unmodified sequence from bacteria or virus of the same subtype. In some embodiments, the non-native nucleic acid sequence is a synthetic, non-naturally occurring sequence (see, e.g., Purcell et al., 2013). The non-native nucleic acid sequence may be a regulatory region, a promoter, a gene, and/or one or more genes in gene cassette. In some embodiments, “non-native” refers to two or more nucleic acid sequences that are not found in the same relationship to each other in nature. The non-native nucleic acid sequence may be present on a plasmid or chromosome.

[0120] As used herein, a “heterologous” gene or “heterologous sequence” refers to a nucleotide sequence that is not normally found in a given cell in nature. As used herein, a heterologous sequence encompasses a nucleic acid sequence that is exogenously introduced into a given cell. “Heterologous gene” includes a native gene, or fragment thereof, that has been introduced into the host cell in a form that is different from the corresponding native gene. For example, a heterologous gene may include a native coding sequence that is a portion of a chimeric gene to include a native coding sequence that is a portion of a chimeric gene to include non-native regulatory regions that is reintroduced into the host cell. A heterologous gene may also include a native gene, or fragment thereof, introduced into a non-native host cell. Thus, a heterologous gene may be foreign or native to the recipient cell; a nucleic acid sequence that is naturally found in a given cell but expresses an unnatural amount of the nucleic acid and/or the polypeptide which it encodes; and/or two or more nucleic acid sequences that are not found in the same relationship to each other in nature.

[0121] As used herein, the term “endogenous gene” refers to a native gene in its natural location in the genome of an organism. As used herein, the term “transgene” refers to a gene that has been introduced into the host organism, e.g., host bacterial cell, genome.

[0122] As used herein, the term “partial regression” refers to an inhibition of growth of a tumor, and/or the regression of a tumor, e.g., in size, after administration of the microorganism(s) and/or immune modulator(s) to a subject having the tumor. In one embodiment, a “partial regression” may refer to a regression of a tumor, e.g., in size, by at least about 5%, at least about 10%, at least about 15%, at least about 20%, at least about 25%, at least about 30%, at least about 40%, at least about 50%, at least about 60%, at least about 70%, at least about 80%, or at least about 90%. In another embodiment, a “partial regression” may refer to a decrease in the size of a tumor by at least about 5%, at least about 10%, at least about 15%, at least about 20%, at least about 25%, at least about 30%, at least about 40%, at least about 50%, at least about 60%, at least about 70%, at least about 75%, at least about 80%, or at least about 90%. In one embodiment, “partial regression” refers to the regression of a tumor, e.g., in size, but wherein the tumor is still detectable in the subject.

[0123] As used herein, the term “complete regression” refers to a complete regression of a tumor, e.g., in size, after administration of the microorganism(s) and/or immune modulator(s) to the subject having the tumor. When “complete regression” occurs the tumor is undetectable in the subject.

[0124] As used herein, the term “percent response” refers to a percentage of subjects in a population of subjects who exhibit either a partial regression or a complete regression, as defined herein, after administration of a microorganism(s) and/or immune modulator(s). For example, in one embodiment, about 5%, about 10%, about 15%, about 20%, about 25%, about 30%, about 35%, about 40%, about 45%, about 50%, about 55%, about 60%, about 65%, about 70%, about 75%, about 80%, about 85%, about 90%, or about 95% of subjects in a population of subjects exhibit a partial response or a complete response.

[0125] As used herein, the term “stable disease” refers to a cancer or tumor that is neither growing nor shrinking. “Stable disease” also refers to a disease state where no new tumors have developed, and a cancer or tumor has not spread to any new region or area of the body, e.g., by metastasis.

[0126] “Intratumoral administration” is meant to include any and all means for microorganism delivery to the intratumoral site and is not limited to intratumoral injection means. Examples of delivery means for the microorganisms is discussed in detail herein.

[0127] “Cancer” or “cancerous” is used to refer to a physiological condition that is characterized by unregulated cell growth. In some embodiments, cancer refers to a tumor. “Tumor” is used to refer to any neoplastic cell growth or proliferation or any pre-cancerous or cancerous cell or tissue. A tumor may be malignant or benign. Types of cancer include, but are not limited to, adrenal cancer, adrenocortical carcinoma, anal cancer, appendix cancer, bile duct cancer, bladder cancer, bone cancer (e.g., Ewing sarcoma tumors, osteosarcoma, malignant fibrous histiocytoma), brain cancer (e.g., astrocytomas, brain stem glioma, craniopharyngioma, ependymoma), bronchial tumors, central nervous system tumors, breast cancer, Castleman disease, cervical cancer, colon cancer, rectal cancer, colorectal cancer, endometrial cancer, esophageal cancer, eye cancer, gallbladder cancer, gastrointestinal cancer, gastrointestinal carcinoid tumors, gastrointestinal stromal tumors, gestational trophoblastic disease, heart cancer, Kaposi sarcoma, kidney cancer, laryngeal cancer, hypopharyngeal cancer, leukemia (e.g., acute lymphoblastic leukemia, acute myeloid leukemia, chronic lymphocytic leukemia, chronic myelogenous leukemia), liver cancer, lung cancer (e.g., small cell lung cancer, non-small cell lung cancer), lymphoma (e.g., AIDS-related lymphoma, Burkitt lymphoma, cutaneous T cell lymphoma, Hodgkin lymphoma, Non-Hodgkin lymphoma, primary central nervous system lymphoma), malignant mesothelioma, multiple myeloma, myelodysplastic syndrome, nasal cavity cancer, paranasal sinus cancer, nasopharyngeal cancer, neuroblastoma, oral cavity cancer, oropharyngeal cancer, osteosarcoma, ovarian cancer, pancreatic cancer, penile cancer, pituitary tumors, prostate cancer, retinoblastoma, rhabdomyosarcoma, rhabdoid tumor, salivary gland cancer, sarcoma (e.g., liposarcoma, chondrosarcoma), skin cancer (e.g., basal cell carcinoma, melanoma, squamous cell carcinoma), small intestine cancer, stomach cancer, teratoid tumor, testicular cancer, throat cancer, thymus cancer, thyroid cancer, unusual childhood cancers, urethral cancer, uterine cancer, uterine sarcoma, vaginal cancer, vulvar cancer, Waldenstrom macroglobulinemia, and Wilms tumor. Side effects of cancer treatment may include, but are not limited to, opportunistic autoimmune disorder(s), systemic toxicity, anemia, loss of appetite, irritation of bladder lining, bleeding and bruising (thrombocytopenia), changes in taste or smell, constipation, diarrhea, dry mouth, dysphagia, edema, fatigue, hair loss (alopecia), infection, infertility, lymphedema, mouth sores, nausea, pain, peripheral neuropathy, tooth decay, urinary tract infections, and/or problems with memory and concentration (National Cancer Institute).

[0128] As used herein, “abscopal” and “abscopal effect” refers to an effect in which localized treatment of a tumor not only shrinks or otherwise affects the tumor being treated, but also shrinks or otherwise affects other tumors outside the scope of the localized treatment. In some embodiments, the bacteria may elicit an abscopal effect. In some embodiments, no abscopal effect is observed upon administration of the bacteria.

[0129] As used herein, “Response Evaluation Criteria in Solid Tumours” or “RECIST” refers to a standard way to measure how well a cancer patient responds to treatment. It is based on whether tumors shrink, stay the same, or get bigger. To use RECIST, there must be at least one tumor that can be measured on x-rays, CT scans, or MRI scans. The types of response a patient can have are a complete response (CR), a partial response (PR), progressive disease (PD), and stable disease (SD).

[0130] In any of these embodiments in which abscopal effect is observed, timing of tumor growth in a tumor of the same type which is distal to the administration site is delayed by at least about 0 to 2 days, at least about 2 to 4 days, at least about 4 to 6 days, at least about 6 to 8 days, at least about 8 to 10 days, at least about 10 to 12 days, at least about 12 to 14 days, at least about 14 to 16 days, at least about 16 to 18 days, at least about 18 to 20 days, at least about 20 to 25 days, at least about 25 to 30 days, at least about 30 to 35 days of the same type relative to the tumor growth (tumor volume) in a naive animal or subject.

[0131] In any of these embodiments in which an abscopal effect is observed, timing of tumor growth as measured in tumor volume in a distal tumor of the same type is delayed by at least about 0 to 2 weeks, at least about 2 to 4 weeks, at least about 4 to 6 weeks, at least about 6 to 8 weeks, at least about 8 to 10 weeks, at least about 10 to 12 weeks, at least about 12 to 14 weeks, at least about 14 to 16 weeks, at least about 16 to 18 weeks, at least about 18 to 20 weeks, at least about 20 to 25 weeks, at least about 25 to 30 weeks, at least about 30 to 35 weeks, at least about 35 to 40 weeks, at least about 40 to 45 weeks, at least about 45 to 50 weeks, at least about 50 to 55 weeks, at least about 55 to 60 weeks, at least about 60 to 65 weeks, at least about 65 to 70 weeks, at least about 70 to 80 weeks, at least about 80 to 90 weeks, or at least about 90 to 100 in a tumor re-challenge relative to the tumor growth (tumor volume) in a naive animal or subject.

[0132] In any of these embodiments in which abscopal effect is observed, timing of tumor growth as measured in tumor volume in a tumor distal to the administration site of the same type is delayed by at least about 0 to 2 years, at least about 2 to 4 years, at least about 4 to 6 years, at least about 6 to 8 years, at least about 8 to 10 years, at least about 10 to 12 years, at least about 12 to 14 years, at least about 14 to 16 years, at least about 16 to 18 years, at least about 18 to 20 years, at least about 20 to 25 years, at least about 25 to 30 years, at least about 30 to 35 years, at least about 35 to 40 years, at least about 40 to 45 years, at least about 45 to 50 years, at least about 50 to 55 years, at least about 55 to 60 years, at least about 60 to 65 years, at least about 65 to 70 years, at least about 70 to 80 years, at least about 80 to 90 years, or at least about 90 to 100 in a tumor re-challenge relative to the tumor growth (tumor volume) in a naive animal or subject.

[0133] In yet another embodiment, survival rate is at least about 1.0-1.2-fold, at least about 1.2-1.4-fold, at least about 1.4-1.6-fold, at least about 1.6-1.8-fold, at least about 1.8-2-fold, or at least about two-fold greater in a tumor re-challenge as compared to the tumor growth (tumor volume) in a naive subject. In yet another embodiment, survival rate is at least about 2 to 3-fold, at least about 3 to 4-fold, at least about 4 to 5-fold, at least about 5 to 6-fold, at least about 6 to 7-fold, at least about 7 to 8-fold, at least about 8 to 9-fold, at least about 9 to 10-fold, at least about 10 to 15-fold, at least about 15 to 20-fold, at least about 20 to 30-fold, at least about 30 to 40-fold, or at least about 40 to 50-fold, at least about 50 to 100-fold, at least about 100 to 500-hundred-fold, or at least about 500 to 1000-fold greater in a tumor re-challenge as compared to the tumor growth (tumor volume) in a naive subject. In this example, “tumor re-challenge” may also include metastasis formation which may occur in a subject at a certain stage of cancer progression.

[0134] Immunological memory represents an important aspect of the immune response in mammals. Memory responses form the basis for the effectiveness of vaccines against cancer cells. As used herein, the term “immune memory” or “immunological memory” refers to a state in which long-lived antigen-specific lymphocytes are available and are capable of rapidly mounting responses upon repeat exposure to a particular antigen. The importance of immunological memory in cancer immunotherapy is known, and the trafficking properties and long-lasting anti-tumor capacity of memory T cells play a crucial role in the control of malignant tumors and prevention of metastasis or reoccurrence. Immunological memory exists for both B lymphocytes and for T cells, and is now believed to exist in a large variety of other immune cells, including NK cells, macrophages, and monocytes. (see e.g., Farber et al., Immunological memory: lessons from the past and a look to the future (Nat. Rev. Immunol. (2016) 16: 124-128). Memory B cells are plasma cells that are able to produce antibodies for a long time. The memory B cell has already undergone clonal expansion and differentiation and affinity maturation, so it is able to divide multiple times faster and produce antibodies with much higher affinity. Memory T cells can be both CD4+ and CD8+. These memory T cells do not require further antigen stimulation to proliferate therefore they do not need a signal via MHC.

[0135] Immunological memory can, for example, be measured in an animal model by re-challenging the animal model upon achievement of complete regression upon treatment with the microorganism. The animal is then implanted with cancer cells from the cancer cell line and growth is monitored and compared to an age matched naïve animal of the same type which had not previously been exposed to the tumor. Such a tumor re-challenge is used to demonstrate systemic and long term immunity against tumor cells and may represent the ability to fight off future recurrence or metastasis formation. Such an experiment is described herein using the A20 tumor model in the Examples. Immunological memory would prevent or slow the reoccurrence of the tumor in the re-challenged animal relative to the naïve animal. On a cellular level, formation of immunological memory can be measured by expansion and/or persistence of tumor antigen specific memory or effector memory T cells.

[0136] In some embodiments, immunological memory is achieved in a subject upon administration of the compositions described herein. In some embodiments, immunological memory is achieved cancer patient upon administration of the compositions described herein.

[0137] In some embodiments, a complete response is achieved in a subject upon administration of the compositions described herein. In some embodiments, a complete response is achieved in a cancer patient upon administration of the compositions described herein.

[0138] In some embodiments, a complete remission is achieved in a subject upon administration of the compositions described herein. In some embodiments, a complete remission is achieved in a cancer patient upon administration of the compositions described herein.

[0139] In some embodiments, a partial response is achieved in a subject upon administration of the compositions described herein. In some embodiments, a partial response is achieved in a cancer patient upon administration of the compositions described herein.

[0140] In some embodiments, stable disease is achieved in a subject upon administration of the compositions described herein. In some embodiments, a partial response is achieved in a cancer patient upon administration of the compositions described herein.

[0141] In some embodiments, a subset of subjects within a group achieves a partial or complete response upon administration of the compositions described herein. In some embodiments, a subset of patients within a group achieve a partial or complete response upon administration of the compositions described herein.

[0142] In any of these embodiments in which immunological memory is observed, timing of tumor growth is delayed by at least about 0 to 2 days, at least about 2 to 4 days, at least about 4 to 6 days, at least about 6 to 8 days, at least about 8 to 10 days, at least about 10 to 12 days, at least about 12 to 14 days, at least about 14 to 16 days, at least about 16 to 18 days, at least about 18 to 20 days, at least about 20 to 25 days, at least about 25 to 30 days, at least about 30 to 35 days in a tumor re-challenge relative to the tumor growth (tumor volume) in a naive animal or subject.

[0143] In any of these embodiments in which immunological memory is observed, timing of tumor growth as measured in tumor volume delayed by at least about 0 to 2 weeks, at least about 2 to 4 weeks, at least about 4 to 6 weeks, at least about 6 to 8 weeks, at least about 8 to 10 weeks, at least about 10 to 12 weeks, at least about 12 to 14 weeks, at least about 14 to 16 weeks, at least about 16 to 18 weeks, at least about 18 to 20 weeks, at least about 20 to 25 weeks, at least about 25 to 30 weeks, at least about 30 to 35 weeks, at least about 35 to 40 weeks, at least about 40 to 45 weeks, at least about 45 to 50 weeks, at least about 50 to 55 weeks, at least about 55 to 60 weeks, at least about 60 to 65 weeks, at least about 65 to 70 weeks, at least about 70 to 80 weeks, at least about 80 to 90 weeks, or at least about 90 to 100 in a tumor re-challenge relative to the tumor growth (tumor volume) in a naive animal or subject.

[0144] In any of these embodiments in which immunological memory is observed, timing of tumor growth as measured in tumor volume delayed by at least about 0 to 2 years, at least about 2 to 4 years, at least about 4 to 6 years, at least about 6 to 8 years, at least about 8 to 10 years, at least about 10 to 12 years, at least about 12 to 14 years, at least about 14 to 16 years, at least about 16 to 18 years, at least about 18 to 20 years, at least about 20 to 25 years, at least about 25 to 30 years, at least about 30 to 35 years, at least about 35 to 40 years, at least about 40 to 45 years, at least about 45 to 50 years, at least about 50 to 55 years, at least about 55 to 60 years, at least about 60 to 65 years, at least about 65 to 70 years, at least about 70 to 80 years, at least about 80 to 90 years, or at least about 90 to 100 in a tumor re-challenge relative to the tumor growth (tumor volume) in a naive animal or subject.

[0145] In yet another embodiment, survival rate is at least about 1.0-1.2-fold, at least about 1.2-1.4-fold, at least about 1.4-1.6-fold, at least about 1.6-1.8-fold, at least about 1.8-2-fold, or at least about two-fold greater in a tumor re-challenge as compared to the tumor growth (tumor volume) in a naive subject. In yet another embodiment, survival rate is at least about 2 to 3-fold, at least about 3 to 4-fold, at least about 4 to 5-fold, at least about 5 to 6-fold, at least about 6 to 7-fold, at least about 7 to 8-fold, at least about 8 to 9-fold, at least about 9 to 10-fold, at least about 10 to 15-fold, at least about 15 to 20-fold, at least about 20 to 30-fold, at least about 30 to 40-fold, or at least about 40 to 50-fold, at least about 50 to 100-fold, at least about 100 to 500-hundred-fold, or at least about 500 to 1000-fold greater in a tumor re-challenge as compared to the tumor growth (tumor volume) in a naive subject.

[0146] As used herein, “hot tumors” refer to tumors, which are T cell inflamed, i.e., associated with a high abundance of T cells infiltrating into the tumor. “Cold tumors” are characterized by the absence of effector T cells infiltrating the tumor and are further grouped into “immune excluded” tumors, in which immune cells are attracted to the tumor but cannot infiltrate the tumor microenvironment, and “immune ignored” phenotypes, in which no recruitment of immune cells occurs at all (further reviewed in Van der Woude et al., Migrating into the Tumor: a Roadmap for T Cells. Trends Cancer. 2017 November; 3(11):797-808).

[0147] “Hypoxia” is used to refer to reduced oxygen supply to a tissue as compared to physiological levels, thereby creating an oxygen-deficient environment. “Normoxia” refers to a physiological level of oxygen supply to a tissue. Hypoxia is a hallmark of solid tumors and characterized by regions of low oxygen and necrosis due to insufficient perfusion (Groot et al., 2007).

[0148] As used herein, the term “low oxygen” is meant to refer to a level, amount, or concentration of oxygen (O₂) that is lower than the level, amount, or concentration of oxygen that is present in the atmosphere (e.g., <21% O₂; <160 torr O₂)). Thus, the term “low oxygen condition or conditions” or “low oxygen environment” refers to conditions or environments containing lower levels of oxygen than are present in the atmosphere.

[0149] In some embodiments, the term “low oxygen” is meant to refer to the level, amount, or concentration of oxygen (O₂) found in a mammalian gut, e.g., lumen, stomach, small intestine, duodenum, jejunum, ileum, large intestine, cecum, colon, distal sigmoid colon, rectum, and anal canal. In some embodiments, the term “low oxygen” is meant to refer to a level, amount, or concentration of O₂ that is 0-60 mmHg O₂ (0-60 torr O₂) (e.g., 0, 1, 2, 3, 4, 5, 6, 7, 8, 9, 10, 11, 12, 13, 14, 15, 16, 17, 18, 19, 20, 21, 22, 23, 24, 25, 26, 27, 28, 29, 30, 31, 32, 33, 34, 35, 36, 37, 38, 39, 40, 41, 42, 43, 44, 45, 46, 47, 48, 49, 50, 51, 52, 53, 54, 55, 56, 57, 58, 59, and 60 mmHg O₂), including any and all incremental fraction(s) thereof (e.g., 0.2 mmHg, 0.5 mmHg O₂, 0.75 mmHg O₂, 1.25 mmHg O₂, 2.175 mmHg O₂, 3.45 mmHg O₂, 3.75 mmHg O₂, 4.5 mmHg O₂, 6.8 mmHg O₂, 11.35 mmHg 02, 46.3 mmHg O₂, 58.75 mmHg, etc., which exemplary fractions are listed here for illustrative purposes and not meant to be limiting in any way). In some embodiments, “low oxygen” refers to about 60 mmHg O₂ or less (e.g., 0 to about 60 mmHg O₂). The term “low oxygen” may also refer to a range of O₂ levels, amounts, or concentrations between 0-60 mmHg O₂ (inclusive), e.g., 0-5 mmHg O₂, <1.5 mmHg O₂, 6-10 mmHg, <8 mmHg, 47-60 mmHg, etc. which listed exemplary ranges are listed here for illustrative purposes and not meant to be limiting in any way. See, for example, Albenberg et al., Gastroenterology, 147(5): 1055-1063 (2014); Bergofsky et al., J Clin. Invest., 41(11): 1971-1980 (1962); Crompton et al., J Exp. Biol., 43: 473-478 (1965); He et al., PNAS (USA), 96: 4586-4591 (1999); McKeown, Br. J. Radiol., 87:20130676 (2014) (doi: 10.1259/brj.20130676), each of which discusses the oxygen levels found in the mammalian gut of various species and each of which are incorporated by reference herewith in their entireties.

[0150] In some embodiments, the term “low oxygen” is meant to refer to the level, amount, or concentration of oxygen (O₂) found in a mammalian organ or tissue other than the gut, e.g., urogenital tract, tumor tissue, etc. in which oxygen is present at a reduced level, e.g., at a hypoxic or anoxic level. In some embodiments, “low oxygen” is meant to refer to the level, amount, or concentration of oxygen (O₂) present in partially aerobic, semi aerobic, microaerobic, nonaerobic, microoxic, hypoxic, anoxic, and/or anaerobic conditions. For example, Table 1 summarizes the amount of oxygen present in various organs and tissues. In some embodiments, the level, amount, or concentration of oxygen (O₂) is expressed as the amount of dissolved oxygen (“DO”) which refers to the level of free, non-compound oxygen (O₂) present in liquids and is typically reported in milligrams per liter (mg/L), parts per million (ppm; 1 mg/L=1 ppm), or in micromoles (umole) (1 umole O₂=0.022391 mg/L O₂). Fondriest Environmental, Inc., “Dissolved Oxygen”, Fundamentals of Environmental Measurements, 19 Nov. 2013, www.fondriest.com/environmental-measurements/parameters/water-quality/dissolved-oxygen/>.

[0151] In some embodiments, the term “low oxygen” is meant to refer to a level, amount, or concentration of oxygen (O₂) that is about 6.0 mg/L DO or less, e.g., 6.0 mg/L, 5.0 mg/L, 4.0 mg/L, 3.0 mg/L, 2.0 mg/L, 1.0 mg/L, or 0 mg/L, and any fraction therein, e.g., 3.25 mg/L, 2.5 mg/L, 1.75 mg/L, 1.5 mg/L, 1.25 mg/L, 0.9 mg/L, 0.8 mg/L, 0.7 mg/L, 0.6 mg/L, 0.5 mg/L, 0.4 mg/L, 0.3 mg/L, 0.2 mg/L and 0.1 mg/L DO, which exemplary fractions are listed here for illustrative purposes and not meant to be limiting in any way. The level of oxygen in a liquid or solution may also be reported as a percentage of air saturation or as a percentage of oxygen saturation (the ratio of the concentration of dissolved oxygen (O₂) in the solution to the maximum amount of oxygen that will dissolve in the solution at a certain temperature, pressure, and salinity under stable equilibrium). Well-aerated solutions (e.g., solutions subjected to mixing and/or stirring) without oxygen producers or consumers are 100% air saturated.

[0152] In some embodiments, the term “low oxygen” is meant to refer to 40% air saturation or less, e.g., 40%, 39%, 38%, 37%, 36%, 35%, 34%, 33%, 32%, 31%, 30%, 29%, 28%, 27%, 26%, 25%, 24%, 23%, 22%, 21%, 20%, 19%, 18%, 17%, 16%, 15%, 14%, 13%, 12%, 11%, 10%, 9%, 8%, 7%, 6%, 5%, 4%, 3%, 2%, 1%, and 0% air saturation, including any and all incremental fraction(s) thereof (e.g., 30.25%, 22.70%, 15.5%, 7.7%, 5.0%, 2.8%, 2.0%, 1.65%, 1.0%, 0.9%, 0.8%, 0.75%, 0.68%, 0.5%. 0.44%, 0.3%, 0.25%, 0.2%, 0.1%, 0.08%, 0.075%, 0.058%, 0.04%. 0.032%, 0.025%, 0.01%, etc.) and any range of air saturation levels between 0-40%, inclusive (e.g., 0-5%, 0.05-0.1%, 0.1-0.2%, 0.1-0.5%, 0.5-2.0%, 0-10%, 5-10%, 10-15%, 15-20%, 20-25%, 25-30%, etc.).

[0153] The exemplary fractions and ranges listed here are for illustrative purposes and not meant to be limiting in any way. In some embodiments, the term “low oxygen” is meant to refer to 9% O₂ saturation or less, e.g., 9%, 8%, 7%, 6%, 5%, 4%, 3%, 2%, 1%, 0%, O₂ saturation, including any and all incremental fraction(s) thereof (e.g., 6.5%, 5.0%, 2.2%, 1.7%, 1.4%, 0.9%, 0.8%, 0.75%, 0.68%, 0.5%. 0.44%, 0.3%, 0.25%, 0.2%, 0.1%, 0.08%, 0.075%, 0.058%, 0.04%. 0.032%, 0.025%, 0.01%, etc.) and any range of O₂ saturation levels between 0-9%, inclusive (e.g., 0-5%, 0.05-0.1%, 0.1-0.2%, 0.1-0.5%, 0.5-2.0%, 0-8%, 5-7%, 0.3-4.2% O₂, etc.). The exemplary fractions and ranges listed here are for illustrative purposes and not meant to be limiting in any way.

TABLE 1

| Compartment | Oxygen Tension |
|---|---|
| stomach | ~60 torr (e.g., 58 +/− 15 torr) |
| duodenum and first part | ~30 torr (e.g., 32 +/− 8 torr); ~20% |
| of jejunum | oxygen in ambient air |
| Ileum (mid- small | ~10 torr; ~6% oxygen in ambient air |
| intestine) | (e.g., 11 +/− 3 torr) |
| Distal sigmoid colon | ~3 torr (e.g., 3 +/− 1 torr) |
| colon | <2 torr |
| Lumen of cecum | <1 torr |
| tumor | <32 torr (most tumors are <15 torr) |

[0154] As used herein, the term “gene” or “gene sequence” refers to any sequence expressing a polypeptide or protein, including genomic sequences, cDNA sequences, naturally occurring sequences, artificial sequences, and codon optimized sequences. The term “gene” or “gene sequence” inter alia includes modification of endogenous genes, such as deletions, mutations, and expression of native and non-native genes under the control of a promoter that that they are not normally associated with in nature.

[0155] As used herein the terms “gene cassette” and “circuit” or “circuitry” inter alia refers to any sequence expressing a polypeptide or protein, including genomic sequences, cDNA sequences, naturally occurring sequences, artificial sequences, and codon optimized sequences includes modification of endogenous genes, such as deletions, mutations, and expression of native and non-native genes under the control of a promoter that that they are not normally associated with in nature.

[0156] An antibody generally refers to a polypeptide of the immunoglobulin family or a polypeptide comprising fragments of an immunoglobulin that is capable of noncovalently, reversibly, and in a specific manner binding a corresponding antigen. An exemplary antibody structural unit comprises a tetramer composed of two identical pairs of polypeptide chains, each pair having one “light” (about 25 kD) and one “heavy” chain (about 50-70 kD), connected through a disulfide bond.

[0157] As used herein, the term “antibody” or “antibodies” is meant to encompasses all variations of antibody and fragments thereof that possess one or more particular binding specificities. Thus, the term “antibody” or “antibodies” is meant to include full length antibodies, chimeric antibodies, humanized antibodies, single chain antibodies (ScFv, camelids), Fab, Fab′, multimeric versions of these fragments (e.g., F(ab′)2), single domain antibodies (sdAB, V_{H}H fragments), heavy chain antibodies (HCAb), nanobodies, diabodies, and minibodies. Antibodies can have more than one binding specificity, e.g. be bispecific. The term “antibody” is also meant to include so-called antibody mimetics, i.e., which can specifically bind antigens but do not have an antibody-related structure.

[0158] A “single-chain antibody” or “single-chain antibodies” typically refers to a peptide comprising a heavy chain of an immunoglobulin, a light chain of an immunoglobulin, and optionally a linker or bond, such as a disulfide bond. The single-chain antibody lacks the constant Fc region found in traditional antibodies. In some embodiments, the single-chain antibody is a naturally occurring single-chain antibody, e.g., a camelid antibody. In some embodiments, the single-chain antibody is a synthetic, engineered, or modified single-chain antibody. In some embodiments, the single-chain antibody is capable of retaining substantially the same antigen specificity as compared to the original immunoglobulin despite the addition of a linker and the removal of the constant regions. In some aspects, the single chain antibody can be a “scFv antibody”, which refers to a fusion protein of the variable regions of the heavy (VH) and light chains (VL) of immunoglobulins (without any constant regions), optionally connected with a short linker peptide of ten to about 25 amino acids, as described, for example, in U.S. Pat. No. 4,946,778, the contents of which is herein incorporated by reference in its entirety. The Fv fragment is the smallest fragment that holds a binding site of an antibody, which binding site may, in some aspects, maintain the specificity of the original antibody. Techniques for the production of single chain antibodies are described in U.S. Pat. No. 4,946,778.

[0159] As used herein, the term “polypeptide” includes “polypeptide” as well as “polypeptides,” and refers to a molecule composed of amino acid monomers linearly linked by amide bonds (i.e., peptide bonds). The term “polypeptide” refers to any chain or chains of two or more amino acids, and does not refer to a specific length of the product. Thus, “peptides,” “dipeptides,” “tripeptides, “oligopeptides,” “protein,” “amino acid chain,” or any other term used to refer to a chain or chains of two or more amino acids, are included within the definition of “polypeptide,” and the term “polypeptide” may be used instead of, or interchangeably with any of these terms. The term “polypeptide” is also intended to refer to the products of post-expression modifications of the polypeptide, including but not limited to glycosylation, acetylation, phosphorylation, amidation, derivatization, proteolytic cleavage, or modification by non-naturally occurring amino acids. A polypeptide of the invention may be of a size of about 3 or more, 5 or more, 10 or more, 20 or more, 25 or more, 50 or more, 75 or more, 100 or more, 200 or more, 500 or more, 1,000 or more, or 2,000 or more amino acids.

[0160] An “isolated” polypeptide or a fragment, variant, or derivative thereof refers to a polypeptide that is not in its natural milieu. No particular level of purification is required. Recombinantly produced polypeptides and proteins expressed in host cells, including but not limited to bacterial or mammalian cells, are considered isolated for purposed of the invention, as are native or recombinant polypeptides which have been separated, fractionated, or partially or substantially purified by any suitable technique. Recombinant peptides, polypeptides or proteins refer to peptides, polypeptides or proteins produced by recombinant DNA techniques, i.e. produced from cells, microbial or mammalian, transformed by an exogenous recombinant DNA expression construct encoding the polypeptide. Proteins or peptides expressed in most bacterial cultures will typically be free of glycan. Fragments, derivatives, analogs or variants of the foregoing polypeptides, and any combination thereof are also included as polypeptides. The terms “fragment,” “variant,” “derivative” and “analog” include polypeptides having an amino acid sequence sufficiently similar to the amino acid sequence of the original peptide and include any polypeptides, which retain at least one or more properties of the corresponding original polypeptide. Fragments of polypeptides of the present invention include proteolytic fragments, as well as deletion fragments. Fragments also include specific antibody or bioactive fragments or immunologically active fragments derived from any polypeptides described herein. Variants may occur naturally or be non-naturally occurring. Non-naturally occurring variants may be produced using mutagenesis methods known in the art. Variant polypeptides may comprise conservative or non-conservative amino acid substitutions, deletions or additions.

[0161] Polypeptides also include fusion proteins. As used herein, the term “variant” includes a fusion protein, which comprises a sequence of the original peptide or sufficiently similar to the original peptide. As used herein, the term “fusion protein” refers to a chimeric protein comprising amino acid sequences of two or more different proteins. Typically, fusion proteins result from well known in vitro recombination techniques. Fusion proteins may have a similar structural function (but not necessarily to the same extent), and/or similar regulatory function (but not necessarily to the same extent), and/or similar biochemical function (but not necessarily to the same extent) and/or immunological activity (but not necessarily to the same extent) as the individual original proteins which are the components of the fusion proteins. “Derivatives” include but are not limited to peptides, which contain one or more naturally occurring amino acid derivatives of the twenty standard amino acids. “Similarity” between two peptides is determined by comparing the amino acid sequence of one peptide to the sequence of a second peptide. An amino acid of one peptide is similar to the corresponding amino acid of a second peptide if it is identical or a conservative amino acid substitution. Conservative substitutions include those described in Dayhoff, M. O., ed., The Atlas of Protein Sequence and Structure 5, National Biomedical Research Foundation, Washington, D.C. (1978), and in Argos, EMBO J. 8 (1989), 779-785. For example, amino acids belonging to one of the following groups represent conservative changes or substitutions: Ala, Pro, Gly, Gln, Asn, Ser, Thr, Cys, Ser, Tyr, Thr, Val, Ile, Leu, Met, Ala, Phe, Lys, Arg, His, Phe, Tyr, Trp, His, Asp, and Glu.

[0162] In any of these combination embodiments, an immune modulator may be fused to a stabilizing polypeptide. Such stabilizing polypeptides are known in the art and include Fc proteins. In some embodiments, the fusion proteins are Fc fusion proteins, such as IgG Fc fusion proteins or IgA Fc fusion proteins.

[0163] In some embodiments, an immune modulator, is covalently fused to the stabilizing polypeptide through a peptide linker or a peptide bond. In some embodiments, the stabilizing polypeptide comprises an immunoglobulin Fc polypeptide. In some embodiments, the immunoglobulin Fc polypeptide comprises at least a portion of an immunoglobulin heavy chain CH2 constant region. In some embodiments, the immunoglobulin Fc polypeptide comprises at least a portion of an immunoglobulin heavy chain CH3 constant region. In some embodiments, the immunoglobulin Fc polypeptide comprises at least a portion of an immunoglobulin heavy chain CH1 constant region. In some embodiments, the immunoglobulin Fc polypeptide comprises at least a portion of an immunoglobulin variable hinge region. In some embodiments, the immunoglobulin Fc polypeptide comprises at least a portion of an immunoglobulin variable hinge region, immunoglobulin heavy chain CH2 constant region and an immunoglobulin heavy chain CH3 constant region. In some embodiments, the immunoglobulin Fc polypeptide is a human IgG4 Fc polypeptide. In some embodiments, the linker comprises a glycine rich peptide. In some embodiments, the glycine rich peptide comprises the sequence [GlyGlyGlyGlySer]n where n is 1, 2, 3, 4, 5 or 6 (SEQ ID NO: 1245). In some embodiments, the fusion protein comprises a SIRPα IgG FC fusion polypeptide. In some embodiments, the fusion protein comprises a SIRPα IgG4 Fc polypeptide. In some embodiments, the glycine rich peptide linker comprises the sequence SGGGGSGGGGSGGGGS (SEQ ID NO: 1121). In some embodiments, the N terminus of SIRPα is covalently fused to the C terminus of a IgG4 Fc through the peptide linker comprising SGGGGSGGGGSGGGGS (SEQ ID NO: 1121).

[0164] In some embodiments, the immune modulator is a multimeric polypeptide. In some embodiments, the polypeptide is a dimer. Non-limiting example of a dimeric proteins include cytokines, such as IL-15 (heterodimer). In some embodiments, the immune modulator comprises one or more polypeptides wherein the one or more polypeptides comprise a first monomer and a second monomer. In some embodiments, the first monomer polypeptide is covalently linked to a second monomer polypeptide through a peptide linker or a peptide bond. In some embodiments, the linker comprises a glycine rich peptide. In some embodiments, the first and the second monomer have the same polypeptide sequence. In some embodiments, the first and the second monomer have each have a different polypeptide sequence. In some embodiments, the first monomer is a IL-12 p35 polypeptide and the second monomer is a IL-12 p40 polypeptide. In some embodiments, the linker comprises GGGGSGGGS (SEQ ID NO: 1244).

[0165] In some embodiments, the immune modulator is a hIGg4 fusion protein which comprises a hIgG4 portion that has about 80%, 81%, 82%, 83%, 84%, 85%, 86%, 87%, 88%, 89%, 90%, 91%, 92%, 93%, 94%, 95%, 96%, 97%, 98%, or 99% identity with one or more of SEQ ID NO: 1117. In another embodiment, the hIgG4 portion comprises SEQ ID NO: 1117. In yet another embodiment, the hIgG4 portion of the polypeptide consists of SEQ ID NO: 1117.

[0166] In some embodiments, the fusion protein comprises a linker portion that has about 80%, 81%, 82%, 83%, 84%, 85%, 86%, 87%, 88%, 89%, 90%, 91%, 92%, 93%, 94%, 95%, 96%, 97%, 98%, or 99% identity with one or more of SEQ ID NO: 1121. In another embodiment, the linker portion comprises SEQ ID NO: 1121. In yet another embodiment, the linker portion of the polypeptide consists of SEQ ID NO: 1121.

[0167] In some embodiments, effector function of an immune modulator can be improved through fusion to another polypeptide that facilitates effector function. A non-limiting example of such a fusion is the fusion of IL-15 to the Sushi domain of IL-15Ralpha, as described herein. In some embodiments, accordingly, a first monomer polypeptide is a IL-15 monomer and the second monomer is a IL-15R alpha sushi domain polypeptide.

[0168] As used herein, the term “sufficiently similar” means a first amino acid sequence that contains a sufficient or minimum number of identical or equivalent amino acid residues relative to a second amino acid sequence such that the first and second amino acid sequences have a common structural domain and/or common functional activity. For example, amino acid sequences that comprise a common structural domain that is at least about 45%, at least about 50%, at least about 55%, at least about 60%, at least about 65%, at least about 70%, at least about 75%, at least about 80%, at least about 85%, at least about 90%, at least about 91%, at least about 92%, at least about 93%, at least about 94%, at least about 95%, at least about 96%, at least about 97%, at least about 98%, at least about 99%, or at least about 100%, identical are defined herein as sufficiently similar. Preferably, variants will be sufficiently similar to the amino acid sequence of the peptides of the invention. Such variants generally retain the functional activity of the peptides of the present invention. Variants include peptides that differ in amino acid sequence from the native and wild-type peptide, respectively, by way of one or more amino acid deletion(s), addition(s), and/or substitution(s). These may be naturally occurring variants as well as artificially designed ones.

[0169] As used herein the term “linker”, “linker peptide” or “peptide linkers” or “linker” refers to synthetic or non-native or non-naturally-occurring amino acid sequences that connect or link two polypeptide sequences, e.g., that link two polypeptide domains. As used herein the term “synthetic” refers to amino acid sequences that are not naturally occurring. Exemplary linkers are described herein. Additional exemplary linkers are provided in US 20140079701, the contents of which are herein incorporated by reference in its entirety. In some embodiments, the linker is a glycine rich linker. In some embodiments, the linker is (Gly-Gly-Gly-Gly-Ser)n. In some embodiments, the linker comprises SEQ ID NO: 979.

[0170] The immune system is typically most broadly divided into two categories—innate immunity and adaptive immunity—although the immune responses associated with these immunities are not mutually exclusive. “Innate immunity” refers to non-specific defense mechanisms that are activated immediately or within hours of a foreign agent's or antigen's appearance in the body. These mechanisms include physical barriers such as skin, chemicals in the blood, and immune system cells, such as dendritic cells (DCs), leukocytes, phagocytes, macrophages, neutrophils, and natural killer cells (NKs), that attack foreign agents or cells in the body and alter the rest of the immune system to the presence of the foreign agents. During an innate immune response, cytokines and chemokines are produced which in combination with the presentation of immunological antigens, work to activate adaptive immune cells and initiate a full blown immunologic response. “Adaptive immunity” or “acquired immunity” refers to antigen-specific immune response. The antigen must first be processed or presented by antigen presenting cells (APCs). An antigen-presenting cell or accessory cell is a cell that displays antigens directly or complexed with major histocompatibility complexes (MHCs) on their surfaces. Professional antigen-presenting cells, including macrophages, B cells, and dendritic cells, specialize in presenting foreign antigen to T helper cells in a MHC-II restricted manner, while other cell types can present antigen originating inside the cell to cytotoxic T cells in a MHC-I restricted manner. Once an antigen has been presented and recognized, the adaptive immune system activates an army of immune cells specifically designed to attack that antigen. Like the innate system, the adaptive system includes both humoral immunity components (B lymphocyte cells) and cell-mediated immunity (T lymphocyte cells) components. B cells are activated to secrete antibodies, which travel through the bloodstream and bind to the foreign antigen. Helper T cells (regulatory T cells, CD4+ cells) and cytotoxic T cells (CTL, CD8+ cells) are activated when their T cell receptor interacts with an antigen-bound MHC molecule. Cytokines and co-stimulatory molecules help the T cells mature, which mature cells, in turn, produce cytokines which allows the production of priming and expansion of additional T cells sustaining the response. Once activated, the helper T cells release cytokines which regulate and direct the activity of different immune cell types, including APCs, macrophages, neutrophils, and other lymphocytes, to kill and remove targeted cells. Helper T cells also secrete extra signals that assist in the activation of cytotoxic T cells which also help to sustain the immune response. Upon activation, CTL undergoes clonal selection, in which it gains functions, divides rapidly to produce an army of activated effector cells, and forms long-lived memory T cells ready to rapidly respond to future threats. Activated CTL then travels throughout the body searching for cells that bear that unique MHC Class I and antigen. The effector CTLs release cytotoxins that form pores in the target cell's plasma membrane, causing apoptosis. Adaptive immunity also includes a “memory” that makes future responses against a specific antigen more efficient. Upon resolution of the infection, T helper cells and cytotoxic T cells die and are cleared away by phagocytes, however, a few of these cells remain as memory cells. If the same antigen is encountered at a later time, these memory cells quickly differentiate into effector cells, shortening the time required to mount an effective response.

[0171] An “immune checkpoint inhibitor” or “immune checkpoint” refers to a molecule that completely or partially reduces, inhibits, interferes with, or modulates one or more immune checkpoint proteins. Immune checkpoint proteins regulate T-cell activation or function, and are known in the art. Non-limiting examples include CTLA-4 and its ligands CD 80 and CD86, and PD-1 and its ligands PD-L1 and PD-L2. Immune checkpoint proteins are responsible for co-stimulatory or inhibitory interactions of T-cell responses, and regulate and maintain self-tolerance and physiological immune responses.

[0172] A “co-stimulatory” molecule or “co-stimulator” is an immune modulator that increases or activates a signal that stimulates an immune response or inflammatory response.

[0173] As used herein, an immune modulator that “inhibits” cancerous cells refers to a molecule that is capable of reducing cell proliferation, reducing tumor growth, and/or reducing tumor volume by at least about 10% to 20%, 20% to 25%, 25% to 30%, 30% to 40%, 40% to 50%, 50% to 60%, 60% to 70%, 70% to 75%, 75% to 80%, 80% to 85%, 85% to 90%, 90% to 95%, 95% to 99%, or more as compared to control, e.g., an untreated control.

[0174] As used herein, an immune modulator that “activates” or “stimulates” a biological molecule, e.g., cytokine, chemokine, immune modulatory metabolite, or any other immune modulatory agent, factor, or molecule, refers to an immune modulator that is capable of activating, increasing, enhancing, or promoting the biological activity, biological function, and/or number of that biological molecule, as compared to control, e.g., an untreated control under the same conditions.

[0175] “Bacteria for intratumoral administration” refer to bacteria that are capable of directing themselves to cancerous cells. Bacteria for intratumoral administration may be naturally capable of directing themselves to cancerous cells, necrotic tissues, and/or hypoxic tissues.

[0176] In some embodiments, bacteria that are not naturally capable of directing themselves to cancerous cells, necrotic tissues, and/or hypoxic tissues are genetically engineered to direct themselves to cancerous cells, necrotic tissues, and/or hypoxic tissues. Bacteria for intratumoral administration may be further engineered to enhance or improve desired biological properties, mitigate systemic toxicity, and/or ensure clinical safety. These species, strains, and/or subtypes may be attenuated, e.g., deleted for a toxin gene.

[0177] In some embodiments, bacteria for intratumoral administration have low infection capabilities. In some embodiments, bacteria for intratumoral administration are motile. In some embodiments, the bacteria for intratumoral administration are capable of penetrating deeply into the tumor, where standard treatments do not reach. In some embodiments, bacteria for intratumoral administration are capable of colonizing at least 20%, at least 30%, at least 40%, at least 50%, at least 60%, at least 70%, at least 80%, at least 90%, or at least 95% of a malignant tumor. Examples of bacteria for intratumoral administration include, but are not limited to, Bifidobacterium, Caulobacter, Clostridium, Escherichia coli, Listeria, Mycobacterium, Salmonella, Streptococcus, and Vibrio, e.g., Bifidobacterium adolescentis, Bifidobacterium bifidum, Bifidobacterium breve UCC2003, Bifidobacterium infantis, Bifidobacterium longum, Clostridium acetobutylicum, Clostridium butyricum, Clostridium butyricum M-55, Clostridium butyricum miyairi, Clostridium cochlearum, Clostridium felsineum, Clostridium histolyticum, Clostridium multifermentans, Clostridium novyi-NT, Clostridium paraputrificum, Clostridium pasteureanum, Clostridium pectinovorum, Clostridium perfringens, Clostridium roseum, Clostridium sporogenes, Clostridium tertium, Clostridium tetani, Clostridium tyrobutyricum, Corynebacterium parvum, Escherichia coli MG1655, Escherichia coli Nissle 1917, Listeria monocytogenes, Mycobacterium bovis, Salmonella choleraesuis, Salmonella typhimurium, and Vibrio cholera (Cronin et al., 2012; Forbes, 2006; Jain and Forbes, 2001; Liu et al., 2014; Morrissey et al., 2010; Nuno et al., 2013; Patyar et al., 2010; Cronin, et al., Mol Ther 2010; 18:1397-407). In some embodiments, the bacteria for intratumoral administration are non-pathogenic bacteria. In some embodiments, intratumoral administration is done via injection.

[0178] “Microorganism” refers to an organism or microbe of microscopic, submicroscopic, or ultramicroscopic size that typically consists of a single cell. Examples of microorganisms include bacteria, viruses, parasites, fungi, certain algae, protozoa, and yeast. In some aspects, the microorganism is modified (“modified microorganism”) from its native state. In certain embodiments, the modified microorganism is a modified bacterium. In some embodiments, the modified microorganism is a genetically engineered bacterium. In certain embodiments, the modified microorganism is a modified yeast. In other embodiments, the modified microorganism is a genetically engineered yeast.

[0179] As used herein, the term “recombinant microorganism” refers to a microorganism, e.g., bacterial, yeast, or viral cell, or bacteria, yeast, or virus, that has been genetically modified from its native state. Thus, a “recombinant bacterial cell” or “recombinant bacteria” refers to a bacterial cell or bacteria that have been genetically modified from their native state. For instance, a recombinant bacterial cell may have nucleotide insertions, nucleotide deletions, nucleotide rearrangements, and nucleotide modifications introduced into their DNA. These genetic modifications may be present in the chromosome of the bacteria or bacterial cell, or on a plasmid in the bacteria or bacterial cell. Recombinant bacterial cells disclosed herein may comprise exogenous nucleotide sequences on plasmids. Alternatively, recombinant bacterial cells may comprise exogenous nucleotide sequences stably incorporated into their chromosome.

[0180] A “programmed or engineered microorganism” refers to a microorganism, e.g., bacterial, yeast, or viral cell, or bacteria, yeast, or virus, that has been genetically modified from its native state to perform a specific function. Thus, a “programmed or bacterial cell” or “programmed or bacteria” refers to a bacterial cell or bacteria that has been genetically modified from its native state to perform a specific function. In certain embodiments, the programmed or bacterial cell has been modified to express one or more proteins, for example, one or more proteins that have a therapeutic activity or serve a therapeutic purpose. The programmed or bacterial cell may additionally have the ability to stop growing or to destroy itself once the protein(s) of interest have been expressed.

[0181] “Non-pathogenic bacteria” refer to bacteria that are not capable of causing disease or harmful responses in a host. In some embodiments, non-pathogenic bacteria are Gram-negative bacteria. In some embodiments, non-pathogenic bacteria are Gram-positive bacteria. In some embodiments, non-pathogenic bacteria do not contain lipopolysaccharides (LPS). In some embodiments, non-pathogenic bacteria are commensal bacteria. Examples of non-pathogenic bacteria include, but are not limited to certain strains belonging to the genus Bacillus, Bacteroides, Bifidobacterium, Brevibacteria, Clostridium, Enterococcus, Escherichia coli, Lactobacillus, Lactococcus, Saccharomyces, and Staphylococcus, e.g., Bacillus coagulans, Bacillus subtilis, Bacteroides fragilis, Bacteroides subtilis, Bacteroides thetaiotaomicron, Bifidobacterium bifidum, Bifidobacterium infantis, Bifidobacterium lactis, Bifidobacterium longum, Clostridium butyricum, Enterococcus faecium, Escherichia coli Nissle, Lactobacillus acidophilus, Lactobacillus bulgaricus, Lactobacillus casei, Lactobacillus johnsonii, Lactobacillus paracasei, Lactobacillus plantarum, Lactobacillus reuteri, Lactobacillus rhamnosus, Lactococcus lactis, and Saccharomyces boulardii (Sonnenborn et al., 2009; Dinleyici et al., 2014; U.S. Pat. Nos. 6,835,376; 6,203,797; 5,589,168; 7,731,976).

[0182] “Probiotic” is used to refer to live, non-pathogenic microorganisms, e.g., bacteria, which can confer health benefits to a host organism that contains an appropriate amount of the microorganism. In some embodiments, the host organism is a mammal. In some embodiments, the host organism is a human. In some embodiments, the probiotic bacteria are Gram-negative bacteria. In some embodiments, the probiotic bacteria are Gram-positive bacteria. Some species, strains, and/or subtypes of non-pathogenic bacteria are currently recognized as probiotic bacteria. Examples of probiotic bacteria include, but are not limited to certain strains belonging to the genus Bifidobacteria, Escherichia coli, Lactobacillus, and Saccharomyces, e.g., Bifidobacterium bifidum, Enterococcus faecium, Escherichia coli strain Nissle, Lactobacillus acidophilus, Lactobacillus bulgaricus, Lactobacillus paracasei, Lactobacillus plantarum, and Saccharomyces boulardii (Dinleyici et al., 2014; U.S. Pat. Nos. 5,589,168; 6,203,797; 6,835,376). The probiotic may be a variant or a mutant strain of bacterium (Arthur et al., 2012; Cuevas-Ramos et al., 2010; Olier et al., 2012; Nougayrede et al., 2006).

[0183] “Operably linked” refers a nucleic acid sequence that is joined to a regulatory region sequence in a manner which allows expression of the nucleic acid sequence, e.g., acts in cis. A regulatory region is a nucleic acid that can direct transcription of a gene of interest and may comprise promoter sequences, enhancer sequences, response elements, protein recognition sites, inducible elements, promoter control elements, protein binding sequences, 5′ and 3′ untranslated regions, transcriptional start sites, termination sequences, polyadenylation sequences, and introns.

[0184] An “inducible promoter” refers to a regulatory region that is operably linked to one or more genes, wherein expression of the gene(s) is increased in the presence of an inducer of said regulatory region. In one embodiment, an inducible promoter is a salicylate promoter. In another embodiment, an inducible promoter is a cumate promoter. In another embodiment, an inducible promoter is a fumarate-and-nitrase reductase promoter.

[0185] “Exogenous environmental condition(s)” refer to setting(s) or circumstance(s) under which the promoter described herein is induced. In some embodiments, the exogenous environmental conditions are specific to a malignant growth containing cancerous cells, e.g., a tumor. The phrase “exogenous environmental conditions” is meant to refer to the environmental conditions external to the intact (unlysed) engineered microorganism, but endogenous or native to tumor environment or the host subject environment. Thus, “exogenous” and “endogenous” may be used interchangeably to refer to environmental conditions in which the environmental conditions are endogenous to a mammalian body, but external or exogenous to an intact microorganism cell. In some embodiments, the exogenous environmental conditions are low-oxygen, microaerobic, or anaerobic conditions, such as hypoxic and/or necrotic tissues. Some solid tumors are associated with low intracellular and/or extracellular pH; in some embodiments, the exogenous environmental condition is a low-pH environment. In some aspects, bacteria have evolved transcription factors that are capable of sensing oxygen levels. Different signaling pathways may be triggered by different oxygen levels and occur with different kinetics. An “oxygen level-dependent promoter” or “oxygen level-dependent regulatory region” refers to a nucleic acid sequence to which one or more oxygen level-sensing transcription factors is capable of binding, wherein the binding and/or activation of the corresponding transcription factor activates downstream gene expression.

[0186] Examples of oxygen level-dependent transcription factors include, but are not limited to, FNR (fumarate and nitrate reductase), ANR, and DNR. Corresponding FNR-responsive promoters, ANR (anaerobic nitrate respiration)-responsive promoters, and DNR (dissimilatory nitrate respiration regulator)-responsive promoters are known in the art (see, e.g., Castiglione et al., 2009; Eiglmeier et al., 1989; Galimand et al., 1991; Hasegawa et al., 1998; Hoeren et al., 1993; Salmon et al., 2003), and non-limiting examples are shown in Table 2.

[0187] In a non-limiting example, a promoter (PfnrS) was derived from the E. coli Nissle fumarate and nitrate reductase gene S (fnrS) that is known to be highly expressed under conditions of low or no environmental oxygen (Durand and Storz, 2010; Boysen et al, 2010). The PfnrS promoter is activated under anaerobic conditions by the global transcriptional regulator FNR that is naturally found in Nissle. Under anaerobic conditions, FNR forms a dimer and binds to specific sequences in the promoters of specific genes under its control, thereby activating their expression. However, under aerobic conditions, oxygen reacts with iron-sulfur clusters in FNR dimers and converts them to an inactive form. In this way, the PfnrS inducible promoter is adopted to modulate the expression of proteins or RNA. PfnrS is used interchangeably in this application as FNRS, fnrs, FNR, P-FNRS promoter and other such related designations to indicate the promoter PfnrS.

[0188] Accordingly, in one embodiment, the Pfnrs promoter has at least about 85%, 86%, 87%, 88%, 89%, 90%, 91%, 92%, 93%, 94%, 95%, 96%, 97%, 98%, or 99% identity with the sequence of SEQ ID NO: 856. In another embodiment, the Pfnrs promoter comprises the sequence of SEQ ID NO: 856. In yet another embodiment the Pfnrs promoter consists of the sequence of SEQ ID NO: 856.

TABLE 2
Examples of transcription factors and
responsive genes and regulatory regions

| Transcription | Examples of responsive genes, promoters, and/or regulatory |
|---|---|
| Factor | regions: |
| FNR | nirB, ydfZ, pdhR, focA, ndH, hlyE, narK, narX, |
| | narG, yfiD, tdcD |
| ANR | arcDABC |
| DNR | norb, norC |

[0189] “Constitutive promoter” refers to a promoter that is capable of facilitating continuous transcription of a coding sequence or gene under its control and/or to which it is operably linked. Constitutive promoters and variants are well known in the art and non-limiting examples of constitutive promoters are described herein and in International Patent Application PCT/US2017/013072, filed Jan. 11, 2017 and published as WO2017/123675, the contents of which is herein incorporated by reference in its entirety. In some embodiments, such promoters are active in vitro, e.g., under culture, expansion and/or manufacture conditions. In some embodiments, such promoters are active in vivo, e.g., in conditions found in the in vivo environment, e.g., the gut and/or the tumor microenvironment.

[0190] As used herein, “stably maintained” or “stable” bacterium or virus is used to refer to a bacterial or viral host cell carrying non-native genetic material, such that the non-native genetic material is retained, expressed, and propagated. The stable bacterium or virus is capable of survival and/or growth in vitro, e.g., in medium, and/or in vivo, e.g., in hypoxic and/or necrotic tissues. For example, the stable bacterium or virus may be a genetically engineered bacterium comprising non-native genetic material, in which the plasmid or chromosome carrying the non-native genetic material is stably maintained in the bacterium or virus, such that the protein encoded by the non-native genetic material can be expressed in the bacterium or virus, and the bacterium or virus is capable of survival and/or growth in vitro and/or in vivo.

[0191] As used herein, the terms “modulate” and “treat” and their cognates refer to an amelioration of a cancer, or at least one discernible symptom thereof. In another embodiment, “modulate” and “treat” refer to an amelioration of at least one measurable physical parameter, not necessarily discernible by the patient. In another embodiment, “modulate” and “treat” refer to inhibiting the progression of a cancer, either physically (e.g., stabilization of a discernible symptom), physiologically (e.g., stabilization of a physical parameter), or both. In another embodiment, “modulate” and “treat” refer to slowing the progression or reversing the progression of a cancer. As used herein, “prevent” and its cognates refer to delaying the onset or reducing the risk of acquiring a given cancer.

[0192] Those in need of treatment may include individuals already having a particular cancer, as well as those at risk of having, or who may ultimately acquire the cancer. The need for treatment is assessed, for example, by the presence of one or more risk factors associated with the development of a cancer (e.g., alcohol use, tobacco use, obesity, excessive exposure to ultraviolet radiation, high levels of estrogen, family history, genetic susceptibility), the presence or progression of a cancer, or likely receptiveness to treatment of a subject having the cancer. Cancer is caused by genomic instability and high mutation rates within affected cells. Treating cancer may encompass eliminating symptoms associated with the cancer and/or modulating the growth and/or volume of a subject's tumor, and does not necessarily encompass the elimination of the underlying cause of the cancer, e.g., an underlying genetic predisposition.

[0193] As used herein, the term “conventional cancer treatment” or “conventional cancer therapy” refers to treatment or therapy that is widely accepted and used by most healthcare professionals. It is different from alternative or complementary therapies, which are not as widely used. Examples of conventional treatment for cancer include surgery, chemotherapy, targeted therapies, radiation therapy, tomotherapy, immunotherapy, cancer vaccines, hormone therapy, hyperthermia, stem cell transplant (peripheral blood, bone marrow, and cord blood transplants), photodynamic therapy, therapy, and blood product donation and transfusion.

[0194] As used herein a “pharmaceutical composition” refers to a preparation of at least one microorganism of the disclosure and/or at least one immune modulator, with other components such as a physiologically suitable carrier and/or excipient.

[0195] The phrases “physiologically acceptable carrier” and “pharmaceutically acceptable carrier” which may be used interchangeably refer to a carrier or a diluent that does not cause significant irritation to an organism and does not abrogate the biological activity and properties of the administered bacterial or viral compound. An adjuvant is included under these phrases.

[0196] The term “excipient” refers to an inert substance added to a pharmaceutical composition to further facilitate administration of an active ingredient. Examples include, but are not limited to, calcium bicarbonate, calcium phosphate, various sugars and types of starch, cellulose derivatives, gelatin, vegetable oils, polyethylene glycols, and surfactants, including, for example, polysorbate 20.

[0197] The terms “therapeutically effective dose” and “therapeutically effective amount” are used to refer to an amount of a compound that results in prevention, delay of onset of symptoms, or amelioration of symptoms of a condition, e.g., a cancer. A therapeutically effective amount may, for example, be sufficient to treat, prevent, reduce the severity, delay the onset, and/or reduce the risk of occurrence of one or more symptoms of a disorder associated with cancerous cells. A therapeutically effective amount, as well as a therapeutically effective frequency of administration, can be determined by methods known in the art and discussed below.

[0198] In some embodiments, the term “therapeutic molecule” refers to a molecule or a compound that is results in prevention, delay of onset of symptoms, or amelioration of symptoms of a condition, e.g., a cancer. In some embodiments, a therapeutic molecule may be, for example, a cytokine, a chemokine, a single chain antibody, a ligand, a metabolic converter, e.g., arginine, a kynurenine consumer, or an adenosine consumer, a T cell co-stimulatory receptor, a T cell co-stimulatory receptor ligand, an engineered chemotherapy, or a lytic peptide, among others.

[0199] The articles “a” and “an,” as used herein, should be understood to mean “at least one,” unless clearly indicated to the contrary.

[0200] The phrase “and/or,” when used between elements in a list, is intended to mean either (1) that only a single listed element is present, or (2) that more than one element of the list is present. For example, “A, B, and/or C” indicates that the selection may be A alone; B alone; C alone; A and B; A and C; B and C; or A, B, and C. The phrase “and/or” may be used interchangeably with “at least one of” or “one or more of” the elements in a list.

### Bacteria

[0201] In one embodiment, the microorganism may be a bacterium. The bacteria may be administered systemically, orally, locally and/or intratumorally. In some embodiments, the bacteria are capable of targeting cancerous cells, particularly in the hypoxic regions of a tumor, and are administered in combination with, e.g., an immune modulator, e.g., immune stimulator or sustainer provided herein.

[0202] In some embodiments, the tumor-targeting microorganism is a bacterium that is naturally capable of directing itself to cancerous cells, necrotic tissues, and/or hypoxic tissues. For example, bacterial colonization of tumors may be achieved without any specific genetic modifications in the bacteria or in the host (Yu et al., 2008). In some embodiments, the tumor-targeting bacterium is a bacterium that is not naturally capable of directing itself to cancerous cells, necrotic tissues, and/or hypoxic tissues, but is genetically engineered to do so. In some embodiments, the bacteria spread hematogenously to reach the targeted tumor(s). Bacterial infection has been linked to tumor regression (Hall, 1998; Nauts and McLaren, 1990), and certain bacterial species have been shown to localize to and lyse necrotic mammalian tumors (Jain and Forbes, 2001). Non-limiting examples of tumor-targeting bacteria are shown in Table 3.

TABLE 3
Bacteria with tumor-targeting capability

| Bacterial Strain | See, e.g., |
|---|---|
| Clostridium novyi-NT | Forbes, Neil S. “Profile of a bacterial |
| | tumor killer.” Nature biotechnology |
| | 24.12 (2006): 1484-1485. |
| Bifidobacterium spp | Liu, Sai, et al. “Tumor-targeting bacterial |
| Streptococcus spp | therapy: A potential treatment for |
| Caulobacter spp | oral cancer.” Oncology letters |
| Clostridium spp | 8.6 (2014): 2359-2366. |
| Escherichia coli MG1655 | Cronin, Michelle, et al. “High resolution |
| Escherichia coli Nissle | in vivo bioluminescent imaging for the |
| Bifidobacterium breve | study of bacterial tumour targeting.” |
| UCC2003 | PloS one 7.1 (2012): e30940.; |
| Salmonella typhimurium | Zhou, et al., Med Hypotheses. 2011 April; |
| | 76(4): 533-4. doi: |
| | 10.1016/j.mehy.2010.12.010. |
| | Epub 2011 January 21; Zhang et al., Appl |
| | Environ Microbiol. 2012 November; |
| | 78(21): 7603-7610; Danino et al., Science |
| | Translational Medicine, 2015 Vol 7 |
| | Issue 289, pp. 289ra84 |
| Clostridium novyi-NT | Bernardes, Nuno, Ananda M. |
| Bifidobacterium spp | Chakrabarty, and Arsenio M. Fialho. |
| Mycobacterium bovis | “Engineering of bacterial strains and |
| Listeria monocytogenes | their products for cancer therapy.” |
| Escherichia coli | Applied microbiology and biotechnology |
| Salmonella spp | 97.12 (2013): 5189-5199. |
| Salmonella typhimurium | |
| Salmonella choleraesuis | Patyar, S., et al. “Bacteria in cancer |
| Vibrio cholera | therapy: a novel experimental strategy.” |
| Listeria monocytogenes | J Biomed Sci 17.1 (2010): 21-30. |
| Escherichia coli | |
| Bifidobacterium adolescentis | |
| Clostridium acetobutylicum | |
| Salmonella typhimurium | |
| Clostridium histolyticum | |
| Escherichia coli Nissle 1917 | Danino et al. “Programmable probiotics |
| | for detection of cancer in urine.” Sci |
| | Transl Med. 2015 May 27; 7(289): |
| | 289ra84 |

[0203] In some embodiments, the bacterium which enhances the efficacy of immunotherapy. Recent studies have suggested that the presence of certain types of gut microbes in mice can enhance the anti-tumor effects of cancer immunotherapy without increasing toxic side effects (M. Vétizou et al., “Anticancer immunotherapy by CTLA-4 blockade relies on the gut microbiota,” Science, doi:10.1126/aad1329, 2015; A. Sivan et al., “Commensal Bifidobacterium promotes antitumor immunity and facilitates anti-PD-L1 efficacy,” Science, doi:0.1126/science.aac4255, 2015). Whether the gut microbial species identified in these mouse studies will have the same effect in humans is not clear. Vetizou et al (2015) describe T cell responses specific for Bacteroides thetaiotaomicron or Bacteroides fragilis that were associated with the efficacy of CTLA-4 blockade in mice and in patients. Sivan et al. (2015) illustrate the importance of Bifidobacterium to antitumor immunity and anti-PD-L1 antibody against (PD-1 ligand) efficacy in a mouse model of melanoma.

[0204] In some embodiments, the bacteria are Bacteroides. In some embodiments, the bacteria are Bifidobacterium. In some embodiments, the bacteria are Escherichia Coli Nissle. In some embodiments, the bacteria are Clostridium novyi-NT. In some embodiments, the bacteria are Clostridium butyricum miyairi.

[0205] In certain embodiments, the microorganisms are obligate anaerobic bacteria. In certain embodiments, the bacteria are facultative anaerobic bacteria. In certain embodiments, the bacteria are aerobic bacteria. In some embodiments, the bacteria are Gram-positive bacteria and lack LPS. In some embodiments, the bacteria are Gram-negative bacteria. In some embodiments, the bacteria are Gram-positive and obligate anaerobic bacteria. In some embodiments, the bacteria are Gram-positive and facultative anaerobic bacteria. In some embodiments, the bacteria are non-pathogenic bacteria. In some embodiments, the bacteria are commensal bacteria. In some embodiments, the bacteria are probiotic bacteria.

[0206] Exemplary bacteria include, but are not limited to, Bacillus, Bacteroides, Bifidobacterium, Brevibacteria, Caulobacter, Clostridium, Enterococcus, Escherichia coli, Lactobacillus, Lactococcus, Listeria, Mycobacterium, Saccharomyces, Salmonella, Staphylococcus, Streptococcus, Vibrio, Bacillus coagulans, Bacillus subtilis, Bacteroides fragilis, Bacteroides subtilis, Bacteroides thetaiotaomicron, Bifidobacterium adolescentis, Bifidobacterium bifidum, Bifidobacterium breve UCC2003, Bifidobacterium infantis, Bifidobacterium lactis, Bifidobacterium longum, Clostridium acetobutylicum, Clostridium butyricum, Clostridium butyricum M-55, Clostridium butyricum miyairi, Clostridium cochlearum, Clostridium felsineum, Clostridium histolyticum, Clostridium multifermentans, Clostridium novyi-NT, Clostridium paraputrificum, Clostridium pasteureanum, Clostridium pectinovorum, Clostridium perfringens, Clostridium roseum, Clostridium sporogenes, Clostridium tertium, Clostridium tetani, Clostridium tyrobutyricum, Corynebacterium parvum, Escherichia coli MG1655, Escherichia coli Nissle 1917, Listeria monocytogenes, Mycobacterium bovis, Salmonella choleraesuis, Salmonella typhimurium, Vibrio cholera, and the bacteria shown in Table 3. In certain embodiments, the bacteria are selected from the group consisting of Enterococcus faecium, Lactobacillus acidophilus, Lactobacillus bulgaricus, Lactobacillus casei, Lactobacillus johnsonii, Lactobacillus paracasei, Lactobacillus plantarum, Lactobacillus reuteri, Lactobacillus rhamnosus, Lactococcus lactis, and Saccharomyces boulardii. In certain embodiments, the bacteria are selected from the group consisting of Bacteroides fragilis, Bacteroides thetaiotaomicron, Bacteroides subtilis, Bifidobacterium bifidum, Bifidobacterium infantis, Bifidobacterium lactis, Clostridium butyricum, Escherichia coli Nissle, Lactobacillus acidophilus, Lactobacillus plantarum, Lactobacillus reuteri, and Lactococcus lactis.

[0207] In some embodiments, Lactobacillus is used. Lactobacillus casei injected intravenously has been found to accumulate in tumors, which was enhanced through nitroglycerin (NG), a commonly used NO donor, likely due to the role of NO in increasing the blood flow to hypovascular tumors (Fang et al., 2016 (Methods Mol Biol. 2016; 1409:9-23. Enhancement of Tumor-Targeted Delivery of Bacteria with Nitroglycerin Involving Augmentation of the EPR Effect).

[0208] In some embodiments, the bacteria are obligate anaerobes. In some embodiments, the bacteria are Clostridia. Clostridia are obligate anaerobic bacterium that produce spores and are naturally capable of colonizing and in some cases lysing hypoxic tumors (Groot et al., 2007). In experimental models, Clostridia have been used to deliver pro-drug converting enzymes and enhance radiotherapy (Groot et al., 2007). In some embodiments, the bacteria is selected from the group consisting of Clostridium novyi-NT, Clostridium histolyticium, Clostridium tetani, Clostridium oncolyticum, Clostridium sporogenes, and Clostridium beijerinckii (Liu et al., 2014). In some embodiments, the Clostridium is naturally non-pathogenic. For example, Clostridium oncolyticum is a pathogenic and capable of lysing tumor cells. In alternate embodiments, the Clostridium is naturally pathogenic but modified to reduce or eliminate pathogenicity. For example, Clostridium novyi are naturally pathogenic, and Clostridium novyi-NT are modified to remove lethal toxins. Clostridium novyi-NT and Clostridium sporogenes have been used to deliver single-chain HIF-1a antibodies to treat cancer and is an “excellent tumor colonizing Clostridium strains” (Groot et al., 2007).

[0209] In some embodiments, the bacteria facultative anaerobes. In some embodiments, the bacteria are Salmonella, e.g., Salmonella typhimurium. Salmonella are non-spore-forming Gram-negative bacteria that are facultative anaerobes. In some embodiments, the Salmonella are naturally pathogenic but modified to reduce or eliminate pathogenicity. For example, Salmonella typhimurium is modified to remove pathogenic sites (attenuated). In some embodiments, the bacteria are Bifidobacterium. Bifidobacterium are Gram-positive, branched anaerobic bacteria. In some embodiments, the Bifidobacterium is naturally non-pathogenic. In alternate embodiments, the Bifidobacterium is naturally pathogenic but modified to reduce or eliminate pathogenicity. Bifidobacterium and Salmonella have been shown to preferentially target and replicate in the hypoxic and necrotic regions of tumors (Yu et al., 2014).

[0210] In some embodiments, the bacteria are Gram-negative bacteria. In some embodiments, the bacteria are E. coli. For example, E. coli Nissle has been shown to preferentially colonize tumor tissue in vivo following either oral or intravenous administration (Zhang et al., 2012 and Danino et al., 2015). E. coli have also been shown to exhibit robust tumor-specific replication (Yu et al., 2008). In some embodiments, the bacteria are Escherichia coli strain Nissle 1917 (E. coli Nissle), a Gram-negative bacterium of the Enterobacteriaceae family that “has evolved into one of the best characterized probiotics” (Ukena et al., 2007). The strain is characterized by its complete harmlessness (Schultz, 2008), and has GRAS (generally recognized as safe) status (Reister et al., 2014, emphasis added).

[0211] In some embodiments, the bacteria are administered repeatedly. In some embodiments, the bacteria are administered once.

[0212] Further examples of bacteria which are suitable are described in International Patent Publication WO/2014/043593, the contents of which are herein incorporated by reference in its entirety. In some embodiments, such bacteria are mutated to attenuate one or more virulence factors. Other bacteria are described at least in Song et al., Infectious Agents and Cancer, 2018; and Lukasiewicz and Fol, J. Immunol. Research, 2018, Article ID 2397808.

[0213] In some embodiments, the bacteria of the disclosure proliferate and colonize a tumor. In some embodiments, colonization persists for several days, several weeks, several months, several years or indefinitely. In some embodiments, the bacteria do not proliferate in the tumor and bacterial counts drop off quickly post injection, e.g., less than a week post injection, until no longer detectable.

### Essential Genes and Auxotrophs

[0214] As used herein, the term “essential gene” refers to a gene that is necessary to for cell growth and/or survival. Bacterial essential genes are well known to one of ordinary skill in the art, and can be identified by directed deletion of genes and/or random mutagenesis and screening (see, for example, Zhang and Lin, 2009, DEG 5.0, a database of essential genes in both prokaryotes and eukaryotes, Nucl. Acids Res., 37:D455-D458 and Gerdes et al., Essential genes on metabolic maps, Curr. Opin. Biotechnol., 17(5):448-456, the entire contents of each of which are expressly incorporated herein by reference).

[0215] An “essential gene” may be dependent on the circumstances and environment in which an organism lives. For example, a mutation of, modification of, or excision of an essential gene may result in the recombinant bacteria of the disclosure becoming an auxotroph. An auxotrophic modification is intended to cause bacteria to die in the absence of an exogenously added nutrient essential for survival or growth because they lack the gene(s) necessary to produce that essential nutrient.

[0216] An auxotrophic modification is intended to cause bacteria to die in the absence of an exogenously added nutrient essential for survival or growth because they lack the gene(s) necessary to produce that essential nutrient. In some embodiments, any of the bacteria described herein also comprise a deletion or mutation in a gene required for cell survival and/or growth. In one embodiment, the essential gene is a DNA synthesis gene, for example, thyA. In another embodiment, the essential gene is a bacterial cell wall synthesis gene, for example, dapA. In yet another embodiment, the essential gene is an amino acid gene, for example, serA or metA. Any gene required for cell survival and/or growth may be targeted, including but not limited to, cysE, glnA, ilvD, leuB, lysA, serA, metA, glyA, hisB, ilvA, pheA, proA, thrC, trpC, tyrA, thyA, uraA, dapA, dapB, dapD, dapE, dapF, flhD, metB, metC, proAB, and thi1, as long as the corresponding wild-type gene product is not produced in the bacteria. Exemplary bacterial genes which may be disrupted or deleted to produce an auxotrophic strain as described in International Patent Application PCT/US2017/013072, filed Jan. 11, 2017, published as WO2017/123675, the contents of which is herein incorporated by reference in its entirety. These include, but are not limited to, genes required for oligonucleotide synthesis, amino acid synthesis, and cell wall synthesis. Table 4 lists exemplary bacterial genes which may be disrupted or deleted to produce an auxotrophic strain. These include, but are not limited to, genes required for oligonucleotide synthesis, amino acid synthesis, and cell wall synthesis.

TABLE 4
Non-limiting Examples of Bacterial Genes
Useful for Generation of an Auxotroph

| Amino Acid | Oligonucleotide | Cell Wall |
|---|---|---|
| cysE | thyA | dapA |
| glnA | uraA | dapB |
| ilvD | | dapD |
| leuB | | dapE |
| lysA | | dapF |
| serA | | |
| metA | | |
| glyA | | |
| hisB | | |
| ilvA | | |
| pheA | | |
| proA | | |
| thrC | | |
| trpC | | |
| tyrA | | |

[0217] Auxotrophic mutations are useful in some instances in which biocontainment strategies may be required to prevent unintended proliferation of the bacterium in a natural ecosystem. Any auxotrophic mutation in an essential gene described above or known in the art can be useful for this purpose, e.g. DNA synthesis genes, amino acid synthesis genes, or genes for the synthesis of cell wall. Accordingly, in some embodiments, the bacteria comprise modifications, e.g., mutation(s) or deletion(s) in one or more auxotrophic genes, e.g., to prevent growth and proliferation of the bacterium in the natural environment. In some embodiments, the modification may be located in a non-coding region. In some embodiments, the modifications result in attenuation of transcription or translation. In some embodiments, the modifications, e.g., mutations or deletions, result in reduced or no transcription or reduced or no translation of the essential gene. In some embodiments, the modifications, e.g., mutations or deletions, result in transcription and/or translation of a non-functional version of the essential gene. In some embodiments, the modifications, e.g., mutations or deletions result in in truncated transcription or translation of the essential gene, resulting in a truncated polypeptide. In some embodiments, the modification, e.g., mutation is located within the coding region of the gene.

[0218] While unable to grow in the natural ecosystem, certain auxotrophic mutations may allow growth and proliferation in the mammalian host administered the bacteria, e.g., in the tumor environment. For example, an essential pathway that is rendered non-functional by the auxotrophic mutation may be complemented by production of the metabolite by the host within the tumor microenvironment. As a result, the bacterium administered to the host can take up the metabolite from the environment and can proliferate and colonize the tumor. Thus, in some embodiments, the auxotrophic gene is an essential gene for the production of a metabolite, which is also produced by the mammalian host in vivo, e.g., in a tumor setting. In some embodiments, metabolite production by the host tumor may allow uptake of the metabolite by the bacterium and permit survival and/or proliferation of the bacterium within the tumor. In some embodiments, bacteria comprising such auxotrophic mutations are capable of proliferating and colonizing the tumor to the same extent as a bacterium of the same subtype which does not carry the auxotrophic mutation.

[0219] In some embodiments, the bacteria are capable of colonizing and proliferating in the tumor microenvironment. In some embodiments, the tumor colonizing bacteria comprise one or more auxotrophic mutations. In some embodiments, the tumor colonizing bacteria do not comprise one or more auxotrophic modifications or mutations. In a non-limiting example, greater numbers of bacteria are detected after 24 hours and 72 hours than were originally injected into the subject. In some embodiments, CFUs detected 24 hours post injection are at least about 1 to 2 logs greater than administered. In some embodiments, CFUs detected 24 hours post injection are at least about 2 to 3 logs greater than administered. In some embodiments, CFUs detected 24 hours post injection are at least about 3 to 4 logs greater than administered. In some embodiments, CFUs detected 24 hours post injection are at least about 4 to 5 logs greater than administered. In some embodiments, CFUs detected 24 hours post injection are at least about 5 to 6 logs greater than administered. In some embodiments, CFUs detected 72 hours post injection are at least about 1 to 2 logs greater than administered. In some embodiments, CFUs detected 72 hours post injection are at least about 2 to 3 logs greater than administered. In some embodiments, CFUs detected 72 hours post injection are at least about 3 to 4 logs greater than administered. In some embodiments, CFUs detected 72 hours post injection are at least about 4 to 5 logs greater than administered. In some embodiments, CFUs detected 72 hours post injection are at least about 5 to 6 logs greater than administered. In some embodiments, CFUs can be measured at later time points, such as after at least one week, after at least 2 or more weeks, after at least one month, after at least two or more months post injection.

[0220] Non-limiting examples of such auxotrophic genes, which allow proliferation and colonization of the tumor, are thyA and uraA, as shown herein. Accordingly, in some embodiments, the bacteria of the disclosure may comprise an auxotrophic modification, e.g., mutation or deletion, in the thyA gene. In some embodiments, the bacteria of the disclosure may comprise an auxotrophic modification, e.g., mutation or deletion, in the uraA gene. In some embodiments, the bacteria of the disclosure may comprise auxotrophic modification, e.g., mutation or deletion, in the thyA gene and the uraA gene.

[0221] Alternatively, the auxotrophic gene is an essential gene for the production of a metabolite which cannot be produced by the host within the tumor, i.e., the auxotrophic mutation is not complemented by production of the metabolite by the host within the tumor microenvironment. As a result, the this mutation may affect the ability of the bacteria to grow and colonize the tumor and bacterial counts decrease over time. This type of auxotrophic mutation can be useful for the modulation of in vivo activity of the immune modulator or duration of activity of the immune modulator, e.g., within a tumor. An example of this method of fine-tuning levels and timing of immune modulator release is described herein using a auxotrophic modification, e.g., mutation, in dapA. Diaminopimelic acid (Dap) is a characteristic component of certain bacterial cell walls, e.g., of gram negative bacteria. Without diaminopimelic acid, bacteria are unable to form proteoglycan, and as such are unable to grow. DapA is not produced by mammalian cells, and therefore no alternate source of DapA is provided in the tumor. As such, a dapA auxotrophy may present a particularly useful strategy to modulate and fine tune timing and extent of bacterial presence in the tumor and/or levels and timing of immune modulator expression and production. Accordingly, in some embodiments, the bacteria of the disclosure comprise an mutation in an essential gene for the production of a metabolite which cannot be produced by the host within the tumor. In some embodiments, the auxotrophic mutation is in a gene which is essential for the production and maintenance of the bacterial cell wall known in the art or described herein, or a mutation in a gene that is essential to another structure that is unique to bacteria and not present in mammalian cells. In some embodiments, bacteria comprising such auxotrophic mutations are capable of proliferating and colonizing the tumor to a substantially lesser extent than a bacterium of the same subtype which does not carry the auxotrophic mutation. Control of bacterial growth (and by extent effector levels) may be further combined with other regulatory strategies, including but not limited to, metabolite or chemically inducible promoters described herein.

[0222] In a non-limiting example, lower numbers of bacteria are detected after 24 hours and 72 hours than were originally injected into the subject. In some embodiments, CFUs detected 24 hours post injection are at least about 1 to 2 logs lower than administered. In some embodiments, CFUs detected 24 hours post injection are at least about 2 to 3 logs lower than administered. In some embodiments, CFUs detected 24 hours post injection are at least about 3 to 4 logs lower than administered. In some embodiments, CFUs detected 24 hours post injection are at least about 4 to 5 logs lower than administered. In some embodiments, CFUs detected 24 hours post injection are at least about 5 to 6 logs lower than administered. In some embodiments, CFUs detected 72 hours post injection are at least about 1 to 2 logs lower than administered. In some embodiments, CFUs detected 72 hours post injection are at least about 2 to 3 logs lower than administered. In some embodiments, CFUs detected 72 hours post injection are at least about 3 to 4 logs lower than administered. In some embodiments, CFUs detected 72 hours post injection are at least about 4 to 5 logs lower than administered. In some embodiments, CFUs detected 72 hours post injection are at least about 5 to 6 logs lower than administered. In some embodiments, CFUs can be measured at later time points, such as after at least one week, after at least 2 or more weeks, after at least one month, after at least two or more months post injection.

[0223] In some embodiments, the bacteria of the disclosure comprise a auxotrophic modification, e.g., mutation, in dapA. trpE is another auxotrophic mutation described herein. Bacteria carrying this mutation cannot produce tryptophan. In some embodiments, the bacteria comprise auxotrophic mutation(s) in one essential gene. In some embodiments, the bacteria comprise auxotrophic mutation(s) in two essential genes (double auxotrophy). In some embodiments, the bacteria comprise auxotrophic mutation(s) in three or more essential gene(s).

[0224] In some embodiments, the bacteria comprise auxotrophic mutation(s) in dapA and thyA. In some embodiments, the bacteria comprise auxotrophic mutation(s) in dapA and uraA. In some embodiments, the bacteria comprise auxotrophic mutation(s) in thyA and uraA. In some embodiments, the bacteria comprise auxotrophic mutation(s) in dapA, thyA and uraA.

[0225] In some embodiments, the bacteria comprise auxotrophic mutation(s) in trpE. In some embodiments, the bacteria comprise auxotrophic mutation(s) in trpE and thyA. In some embodiments, the bacteria comprise auxotrophic mutation(s) in trpE and dapA. In some embodiments, the bacteria comprise auxotrophic mutation(s) in trpE and uraA. In some embodiments, the bacteria comprise auxotrophic mutation(s) in trpE, dapA and thyA. In some embodiments, the bacteria comprise auxotrophic mutation(s) in trpE, dapA and uraA. In some embodiments, the bacteria comprise auxotrophic mutation(s) in trpE, thyA and uraA. In some embodiments, the bacteria comprise auxotrophic mutation(s) in trpE, dapA, thyA and uraA.

[0226] In another non-limiting example, a conditional auxotroph can be generated. The chromosomal copy of dapA or thyA is knocked out. Another copy of thyA or dapA is introduced, e.g., under control of a low oxygen promoter. Under anaerobic conditions, dapA or thyA—as the case may be—are expressed, and the strain can grow in the absence of dap or thymidine. Under aerobic conditions, dapA or thyA expression is shut off, and the strain cannot grow in the absence of dap or thymidine. Such a strategy can also be employed to allow survival of bacteria under anaerobic conditions, e.g., the gut or conditions of the tumor microenvironment, but prevent survival under aerobic conditions.

[0227] In some embodiments, the bacteria comprise auxotrophic mutation(s) in thyA gene, wherein the thyA gene sequence(s) encoding one or more ThyA polypeptide(s) comprising SEQ ID NO: 1004 or functional fragments thereof. In some embodiments, the bacteria comprise auxotrophic mutation(s) in thyA gene, wherein the thyA gene sequence encoding a polypeptide that has at least about 80%, at least about 85%, at least about 90%, at least about 95%, or at least about 99% identity to SEQ ID NO: 1004 or a functional fragment thereof. In some embodiments, the polypeptide has at least about 85%, 86%, 87%, 88%, 89%, 90%, 91%, 92%, 93%, 94%, 95%, 96%, 97%, 98%, or 99% identity with SEQ ID NO: 1004. In some specific embodiments, the polypeptide comprises SEQ ID NO: 1004. In other specific embodiments, the polypeptide consists of SEQ ID NO: 1004.

[0228] In some embodiments, the bacteria comprise auxotrophic mutation(s) in thyA gene, wherein the thyA gene sequence(s) comprising SEQ ID NO: 1001 or functional fragments thereof. In some embodiments, the bacteria comprise auxotrophic mutation(s) in thyA gene, wherein the thyA gene sequence has at least about 80%, at least about 85%, at least about 90%, at least about 95%, or at least about 99% identity to SEQ ID NO: 1001. In some embodiments, the thyA gene has at least about 85%, 86%, 87%, 88%, 89%, 90%, 91%, 92%, 93%, 94%, 95%, 96%, 97%, 98%, or 99% identity with SEQ ID NO: 1001. In some specific embodiments, the thyA gene comprises SEQ ID NO: 1001. In other specific embodiments, the thyA gene consists of SEQ ID NO: 1001.

[0229] In some embodiments, the bacteria comprise auxotrophic mutation(s) in dapA gene, wherein the dapA gene sequence(s) encoding one or more DapA polypeptide(s) comprising SEQ ID NO: 1003 or functional fragments thereof. In some embodiments, the bacteria comprise auxotrophic mutation(s) in dapA gene, wherein the dapA gene sequence encoding a polypeptide that has at least about 80%, at least about 85%, at least about 90%, at least about 95%, or at least about 99% identity to SEQ ID NO: 1003 or a functional fragment thereof. In some embodiments, the polypeptide has at least about 85%, 86%, 87%, 88%, 89%, 90%, 91%, 92%, 93%, 94%, 95%, 96%, 97%, 98%, or 99% identity with SEQ ID NO: 1003. In some specific embodiments, the polypeptide comprises SEQ ID NO: 1003. In other specific embodiments, the polypeptide consists of SEQ ID NO: 1003.

[0230] In some embodiments, the bacteria comprise auxotrophic mutation(s) in dapA gene, wherein the dapA gene sequence(s) comprising SEQ ID NO: 1000. In some embodiments, the bacteria comprise auxotrophic mutation(s) in dapA gene, wherein the dapA gene sequence has at least about 80%, at least about 85%, at least about 90%, at least about 95%, or at least about 99% identity to SEQ ID NO: 1000. In some embodiments, the dapA gene has at least about 85%, 86%, 87%, 88%, 89%, 90%, 91%, 92%, 93%, 94%, 95%, 96%, 97%, 98%, or 99% identity with SEQ ID NO: 1000. In some specific embodiments, the dapA gene comprises SEQ ID NO: 1000. In other specific embodiments, the dapA gene consists of SEQ ID NO: 1000.

[0231] In some embodiments, the bacterium of the present disclosure is a synthetic ligand-dependent essential gene (SLiDE) bacterial cell. SLiDE bacterial cells are synthetic auxotrophs with a mutation in one or more essential genes that only grow in the presence of a particular ligand (see Lopez and Anderson “Synthetic Auxotrophs with Ligand-Dependent Essential Genes for a BL21 (DE3 Biosafety Strain,” ACS Synthetic Biology (2015) DOI: 10.1021/acssynbio.5b00085, the entire contents of which are expressly incorporated herein by reference). SLiDE bacterial cells are described in International Patent Application PCT/US2017/013072, filed Jan. 11, 2017, published as WO2017/123675, the contents of which is herein incorporated by reference in its entirety.

### Phage Deletion

[0232] In some embodiments, the genetically engineered bacteria comprise one or more E. coli Nissle bacteriophage, e.g., Phage 1, Phage 2, and Phage 3. In some embodiments, the genetically engineered bacteria comprise one or mutations in Phage 3. Such mutations include deletions, insertions, substitutions and inversions and are located in or encompass one or more Phage 3 genes. In some embodiments, the one or more insertions comprise an antibiotic cassette. In some embodiments, the mutation is a deletion. In some embodiments, the genetically engineered bacteria comprise one or more deletions, which are located in or comprise one or more genes selected from ECOLIN_09965, ECOLIN_09970, ECOLIN_09975, ECOLIN_09980, ECOLIN_09985, ECOLIN_09990, ECOLIN_09995, ECOLIN_10000, ECOLIN_10005, ECOLIN_10010, ECOLIN_10015, ECOLIN_10020, ECOLIN_10025, ECOLIN_10030, ECOLIN_10035, ECOLIN_10040, ECOLIN_10045, ECOLIN_10050, ECOLIN_10055, ECOLIN_10065, ECOLIN_10070, ECOLIN_10075, ECOLIN_10080, ECOLIN_10085, ECOLIN_10090, ECOLIN_10095, ECOLIN_10100, ECOLIN_10105, ECOLIN_10110, ECOLIN_10115, ECOLIN_10120, ECOLIN_10125, ECOLIN_10130, ECOLIN_10135, ECOLIN_10140, ECOLIN_10145, ECOLIN_10150, ECOLIN_10160, ECOLIN_10165, ECOLIN_10170, ECOLIN_10175, ECOLIN_10180, ECOLIN_10185, ECOLIN_10190, ECOLIN_10195, ECOLIN_10200, ECOLIN_10205, ECOLIN_10210, ECOLIN_10220, ECOLIN_10225, ECOLIN_10230, ECOLIN_10235, ECOLIN_10240, ECOLIN_10245, ECOLIN_10250, ECOLIN_10255, ECOLIN_10260, ECOLIN_10265, ECOLIN_10270, ECOLIN_10275, ECOLIN_10280, ECOLIN_10290, ECOLIN_10295, ECOLIN_10300, ECOLIN_10305, ECOLIN_10310, ECOLIN_10315, ECOLIN_10320, ECOLIN_10325, ECOLIN_10330, ECOLIN_10335, ECOLIN_10340, and ECOLIN_10345. In one embodiment, the genetically engineered bacteria comprise a complete or partial deletion of one or more of ECOLIN_10110, ECOLIN_10115, ECOLIN_10120, ECOLIN_10125, ECOLIN_10130, ECOLIN_10135, ECOLIN_10140, ECOLIN_10145, ECOLIN_10150, ECOLIN_10160, ECOLIN_10165, ECOLIN_10170, and ECOLIN_10175. In one specific embodiment, the deletion is a complete deletion of ECOLIN_10110, ECOLIN_10115, ECOLIN_10120, ECOLIN_10125, ECOLIN_10130, ECOLIN_10135, ECOLIN_10140, ECOLIN_10145, ECOLIN_10150, ECOLIN_10160, ECOLIN_10165, and ECOLIN_10170, and a partial deletion of ECOLIN_10175. In one embodiment, the sequence of SEQ ID NO: 1447 is deleted from the Phage 3 genome. In one embodiment, a sequence comprising SEQ ID NO: 1447 is deleted from the Phage 3 genome.

[0233] In one embodiment, a phage deletion, wherein the phage deletion is encoded by a gene sequence having at least 90%, 91%, 92%, 93%, 94%, 95%, 96%, 97%, 98%, or 99% identity to, comprises, or consists of SEQ ID NO: 1447.

### Activation of Antigen Presenting Cells

### STING Agonists

[0234] Stimulator of interferon genes (STING) protein was shown to be a critical mediator of the signaling triggered by cytosolic nucleic acid derived from DNA viruses, bacteria, and tumor-derived DNA. The ability of STING to induce type I interferon production lead to studies in the context of antitumor immune response, and as a result, STING has emerged to be a potentially potent target in anti-tumor immunotherapies. A large part of the antitumor effects caused by STING activation may depend upon production of IFN-0 by APCs and improved antigen presentation by these cells, which promotes CD8+ T cell priming against tumor-associated antigens. However, STING protein is also expressed broadly in a variety of cell types including myeloid-derived suppressor cells (MDSCs) and cancer cells themselves, in which the function of the pathway has not yet been well characterized (Sokolowska, O. & Nowis, D; STING Signaling in Cancer Cells: Important or Not?; Archivum Immunologiae et Therapiae Experimentalis; Arch. Immunol. Ther. Exp. (2018) 66: 125).

[0235] Stimulator of interferon genes (STING), also known as transmembrane protein 173 (TMEM173), mediator of interferon regulatory factor 3 activation (MITA), MPYS or endoplasmic reticulum interferon stimulator (ERIS), is a dimeric protein which is mainly expressed in macrophages, T cells, dendritic cells, endothelial cells, and certain fibroblasts and epithelial cells. STING plays an important role in the innate immune response—mice lacking STING are viable though prone to lethal infection following exposure to a variety of microbes. STING functions as a cytosolic receptor for the second messengers in the form of cytosolic cyclic dinucleotides (CDNs), such as cGAMP and the bacterial second messengers c-di-GMP and c-di-AMP. Upon stimulation by the CDN a conformational change in STING occurs. STING translocates from the ER to the Golgi apparatus and its carboxyterminus is liberated, This leads to the activation of TBK1 (TANK-binding kinase 1)/IRF3 (interferon regulatory factor 3), NF-κB, and STAT6 signal transduction pathways, and thereby promoting type I interferon and proinflammatory cytokine responses. CDNs include canonical cyclic di-GMP (c[G(30-50)pG(30-50)p] or cyclic di-AMP or cyclic GAMP (cGMP-AMP) (Barber, STING-dependent cytosolic DNA sensing pathways; Trends Immunol. 2014 February; 35(2):88-93).

[0236] CDNs can be exogenously (i.e., bacterially) and/or endogenously produced (i.e., within the host by a host enzyme upon exposure to dsDNA). STING is able to recognize various bacterial second messenger molecules cyclic diguanylate monophosphate (c-di-GMP) and cyclic diadenylate monophosphate (c-di-AMP), which triggers innate immune signaling response (Ma et al., The cGAS-STING Defense Pathway and Its Counteraction by Viruses; Cell Host & Microbe 19, Feb. 10, 2016). Additionally cyclic GMPAMP (cGAMP) can also bind to STING and result inactivation of IRF3 and β-interferon production. Both 3′5′-3′5′ cGAMP (3′3′ cGAMP) produced by Vibrio cholerae, and the metazoan secondary messenger cyclic [G(2′,5′)pA(3′5′)] (2′3′ cGAMP), could activate the innate immune response through STING pathway (Yi et al., Single Nucleotide Polymorphisms of Human STING Can Affect Innate Immune Response to Cyclic Dinucleotides; PLOS One (2013). 8(10)e77846, an references therein). Bacterial and metazoan (e.g., human) c-di-GAMP synthases (cGAS) utilizes GTP and ATP to generate cGAMP capable of STING activation. In contrast to prokaryotic CDNs, which have two canonical 30-50 phosphodiester linkages, the human cGAS product contains a unique 20-50 bond resulting in a mixed linkage cyclic GMP-AMP molecule, denoted as 2′,3′ cGAMP (as described in (Kranzusch et al., Ancient Origin of cGAS-STING Reveals Mechanism of Universal 2′,3′ cGAMP Signaling; Molecular Cell 59, 891-903, Sep. 17, 2015 and references therein). The bacterium Vibrio cholerae encodes an enzyme called DncV that is a structural homolog of cGAS and synthesizes a related second messenger with canonical 3′-5′ bonds (3′,3′ cGAMP).

[0237] Components of the stimulator of interferon genes (STING) pathway plays an important role in the detection of tumor cells by the immune system. In preclinical studies, cyclic dinucleotides (CDN), naturally occurring or rationally designed synthetic derivatives, are able to promote an aggressive antitumor response. For example, when co-formulated with an irradiated GM-CSF-secreting whole-cell vaccine in the form of STINGVAX, synthetic CDNs increased the antitumor efficacy and STINGVAX combined with PD-1 blockade induced regression of established tumors (Fu et al., STING agonist formulated cancer vaccines can cure established tumors resistant to PD-1 blockade; Sci Transl Med. 2015 Apr. 15; 7(283): 283ra52). In another example, Smith et al. conducted a study showing that STING agonists may augment CAR T therapy by stimulating the immune response to eliminate tumor cells that are not recognized by the adoptively transferred lymphocytes and thereby improve the effectiveness of CAR T cell therapy (Smith et al., Biopolymers co-delivering engineered T cells and STING agonists can eliminate heterogeneous tumors; J Clin Invest. 2017 Jun. 1; 127(6):2176-2191).

[0238] In some embodiments, the recombinant microorganism expresses a STING agonist. Non limiting examples of STING agonists include 3′3′ cGAMP, 2′3′cGAMP, 2′2′-cGAMP, 2′2′-cGAMP VacciGrade™ (Cyclic [G(2′,5′)pA(2′,5′)p]), 2′3′-cGAMP, 2′3′-cGAMP VacciGrade™ (Cyclic [G(2′,5′)pA(3′,5′)p]), 2′3′-cGAM(PS)2 (Rp/Sp), 3′3′-cGAMP, 3′3′-cGAMP VacciGrade™ (Cyclic [G(3′,5′)pA(3′,5′)p]), c-di-AMP, c-di-AMP VacciGrade™ (Cyclic diadenylate monophosphate Th1/Th2 response), 2′3′-c-di-AMP, 2′3′-c-di-AM(PS)2 (Rp,Rp) (Bisphosphorothioate analog of c-di-AMP, Rp isomers), 2′3′-c-di-AM(PS)2 (Rp,Rp) VacciGrade™ c-di-GMP, c-di-GMP VacciGrade™, 2′3′-c-di-GMP, and c-di-IMP.

[0239] In one embodiment, the STING agonist is c-diAMP. In one embodiment, the STING agonist is c-GAMP. In one embodiment, the STING agonist is c-diGMP.

[0240] In one embodiment, the modified microorganism comprises at least one gene sequence encoding an enzyme which produces the STING agonist. In one embodiment, the at least one gene sequence is a dacA gene sequence. In one embodiment, the dacA gene sequence is a dacA gene sequence from Listeria monocytogenes. In some embodiments, the dacA gene is integrated into the chromosome.

[0241] In one embodiment, the at least one gene sequence is a cGAS gene sequence. In one embodiment, the cGAS gene sequence is a human cGAS gene sequence. In one embodiment, the cGAS gene sequence is selected from a human cGAS gene sequence a Verminephrobacter eiseniae cGAS gene sequence, Kingella denitrificans cGAS gene sequence, and a Neisseria bacilliformis cGAS gene sequence.

[0242] DacA may be under the control of a constitutive or inducible promoter, e.g., low oxygen inducible promoter such as FNR or any other constitutive or inducible promoter described herein. In some embodiments, the FNR promoter nucleotide sequence has at least about 85%, 86%, 87%, 88%, 89%, 90%, 91%, 92%, 93%, 94%, 95%, 96%, 97%, 98%, or 99% identity to, comprises, or consists of SEQ ID NO: 1282. In some embodiments, the FNR promoter nucleotide sequence is SEQ ID NO: 1282.

[0243] In some embodiments, the genetically engineered bacteria comprise dacA gene sequence(s) encoding one or more DacA polypeptide(s) comprising SEQ ID NO: 1209 or functional fragments thereof. In some embodiments, genetically engineered bacteria comprise a gene sequence encoding a polypeptide that has at least about 80%, at least about 85%, at least about 90%, at least about 95%, or at least about 99% identity to SEQ ID NO: 1209 or a functional fragment thereof. In some embodiments, the polypeptide has at least about 85%, 86%, 87%, 88%, 89%, 90%, 91%, 92%, 93%, 94%, 95%, 96%, 97%, 98%, or 99% identity with SEQ ID NO: 1209. In some specific embodiments, the polypeptide comprises SEQ ID NO: 1209. In other specific embodiments, the polypeptide consists of SEQ ID NO: 1209.

(SEQ ID NO: 1209)
MDFSNMSILHYLANIVDILVVWFVIYKVIMLIRGTKAVQLLKGIFIIIAV
KLLSGFFGLQTVEWITDQMLTWGFLAIIIIFQPELRRALETLGRGNIFTR
YGSRIEREQHHLIESIEKSTQYMAKRRIGALISVARDTGMDDYIETGIPL
NAKISSQLLINIFIPNTPLHDGAVIIKGNEIASAASYLPLSDSPFLSKEL
GTRHRAALGISEVTDSITIVVSEETGGISLTKGGELFRDVSEEELHKILL
KELVTVTAKKPSIFSKWKGGKSE

[0244] In certain embodiments, the dacA sequence has at least about 80% identity with SEQ ID NO: 1210. In certain embodiments, the dacA gene sequence has at least about 90% identity with SEQ ID NO: 1210. In certain embodiments, the dacA gene sequence has at least about 95% identity with SEQ ID NO: 1210. In some embodiments, the dacA gene sequence has at least about 85%, 86%, 87%, 88%, 89%, 90%, 91%, 92%, 93%, 94%, 95%, 96%, 97%, 98%, or 99% identity with SEQ ID NO: 1210. In some specific embodiments, the dacA gene sequence comprises SEQ ID NO: 1210. In other specific embodiments, the dacA gene sequence consists of SEQ ID NO: 1210.

(SEQ ID NO: 1210)
atggactttt ccaacatgag tatccttcac tatttagcga
atattgtaga cattttggtg gtttggttcg taatttacaa
ggttatcatg cttatccgcg gcacgaaagc cgtccagctg
ttgaagggga ttttcattat tattgccgtc aagttactta
gcggcttctt cggattgcag acagtggaat ggattactga
tcaaatgctg acttggggtt tcttagccat tatcattatc
tttcaaccgg aattgcgtcg tgccctggag actttggggc
gtggcaatat ctttacccgc tatggatcac gcattgagcg
tgaacaacac caccttattg agtctattga aaagtccacg
caatacatgg cgaagcgtcg cattggagct ttgatctctg
tggctcgtga tacaggcatg gacgactaca tcgagactgg
cattccgctt aatgcgaaaa tctcatcgca attattgatt
aatatcttca tccccaatac ccctcttcac gatggcgcag
tgatcattaa aggtaacgag atcgcgagcg ctgccagtta
tctgccattg tccgactcgc cgtttctttc taaggagctg
ggaactcgcc atcgtgccgc attagggatt tccgaggtga
cagattcaat cacaatcgtt gtcagcgagg aaacaggtgg
gatttccctt acgaagggag gcgaactgtt ccgtgatgta
tccgaagaag aattgcataa gattttgctt aaagagctgg
tgactgtcac agctaaaaaa ccaagcattt tctccaaatg
gaaaggaggt aagtccgagt ga

[0245] In some embodiments, the genetically engineered bacteria comprise dacA gene sequence(s) operably linked to a promoter which is inducible under low oxygen conditions, e.g., an FNR inducible promoter as described herein. In certain embodiments, the sequence of the dacA gene operably linked to the FNR inducible promoter has at least about 80%, 85%, 90%, 91%, 92%, 93%, 94%, 95%, 96%, 97%, 98%, 99% identity with, comprises, or consists of with SEQ ID NO: 1284. In certain embodiments, the sequence of the dacA gene operably linked to the FNR inducible promoter has at least about 90% identity with SEQ ID NO: 1284. In certain embodiments, the sequence of the dacA gene operably linked to the FNR inducible promoter has at least about 95% identity with SEQ ID NO: 1284. In some embodiments, the sequence of the dacA gene operably linked to the FNR inducible promoter has at least about 85%, 86%, 87%, 88%, 89%, 90%, 91%, 92%, 93%, 94%, 95%, 96%, 97%, 98%, or 99% identity with SEQ ID NO: 1284. In some specific embodiments, the sequence of the dacA gene operably linked to the FNR inducible promoter comprises SEQ ID NO: 1284. In other specific embodiments the sequence of the dacA gene operably linked to the FNR inducible promoter consists of SEQ ID NO: 1284.

(SEQ ID NO: 1284)
agttgttctt attggtggtg ttgctttatg gttgcatcgt
agtaaatggt tgtaacaaaa gcaatttttc cggctgtctg
tatacaaaaa cgccgcaaag tttgagcgaa gtcaataaac
tctctaccca ttcagggcaa tatctctctt ggatccaaag
tgaacccgca tcccacgcta actaatataa ggggggcaag
aatggacttt tccaacatga gtatccttca ctatttagcg
aatattgtag acattttggt ggtttggttc gtaatttaca
aggttatcat gcttatccgc ggcacgaaag ccgtccagct
gttgaagggg attttcatta ttattgccgt caagttactt
agcggcttct tcggattgca gacagtggaa tggattactg
atcaaatgct gacttggggt ttcttagcca ttatcattat
ctttcaaccg gaattgcgtc gtgccctgga gactttgggg
cgtggcaata tctttacccg ctatggatca cgcattgagc
gtgaacaaca ccaccttatt gagtctattg aaaagtccac
gcaatacatg gcgaagcgtc gcattggagc tttgatctct
gtggctcgtg atacaggcat ggacgactac atcgagactg
gcattccgct taatgcgaaa atctcatcgc aattattgat
taatatcttc atccccaata cccctcttca cgatggcgca
gtgatcatta aaggtaacga gatcgcgagc gctgccagtt
atctgccatt gtccgactcg ccgtttcttt ctaaggagct
gggaactcgc catcgtgccg cattagggat ttccgaggtg
acagattcaa tcacaatcgt tgtcagcgag gaaacaggtg
ggatttccct tacgaaggga ggcgaactgt tccgtgatgt
atccgaagaa gaattgcata agattttgct taaagagctg
gtgactgtca cagctaaaaa accaagcatt ttctccaaat
ggaaaggagg taagtccgag tga

### Activation and Priming of Effector Immune Cells (Immune Stimulators)

### Cytokines and Cytokine Receptors

[0246] CD4 (4) is a glycoprotein found on the surface of immune cells such as cells, monocytes, macrophages, and dendritic cells. CD4+T helper cells are white blood cells that function to send signals to other types of immune cells, thereby assisting other immune cells in immunologic processes, including maturation of B cells Into plasma cells and memory B cells, and activation of cytotoxic T cells and macrophages. T helper cells become activated when they are presented with peptide antigens by MHC class II molecules, which are expressed on the surface of antigen-presenting cells (APCs). Once activated, T helper cells divide and secrete cytokines that regulate or assist in the active immune response. T helper cells can differentiate into one of several subtypes, including TH1, TH2, TH3, TH17, TH9, or TFH cells, which secrete different cytokines to facilitate different types of immune responses.

[0247] Cytotoxic T cells (TC cells, or CTLs) destroy virus-infected cells and tumor cells, and are also implicated in transplant rejection. These cells are also known as CD8+ T cells since they express the CD8 glycoprotein at their surfaces. Cytotoxic T cells recognize their targets by binding to antigen associated with MHC class I molecules, which are present on the surface of all nucleated cells.

[0248] In some embodiments, the immune modulator modulates one or more T effector cells, e.g., CD4+ cell and/or CD8+ cell. In some embodiments, the immune modulator that activate, stimulate, and/or induce the differentiation of one or more T effector cells, e.g., CD4+ and/or CD8+ cells. In some embodiments, the immune modulator is a cytokine that activates, stimulates, and/or induces the differentiation of a T effector cell, e.g., CD4+ and/or CD8+ cells. In some embodiments, the cytokine is selected from IL-2, IL-15, IL-12, IL-7, IL-21, IL-18, TNF, and IFN-gamma.

[0249] As used herein, the term “cytokines” includes fusion proteins which comprise one or more cytokines, which are fused through a peptide linked to another cytokine or other immune modulatory molecule. Examples include but are not limited to IL-12 and IL-15 fusion proteins. In general, all agonists and antagonists described herein may be fused to another polypeptide of interest through a peptide linker, to improve or alter their function. Non-limiting examples of such fusion proteins include one or more cytokine polypeptides operably linked to an antibody polypeptide, wherein the antibody recognizes a tumor-specific antigen, thereby bringing the cytokine(s) into proximity with the tumor.

[0250] Interleukin 12 (IL-12) is a cytokine, the actions of which create an interconnection between the innate and adaptive immunity. IL-12 is secreted by a number of immune cells, including activated dendritic cells, monocytes, macrophages, and neutrophils, as well as other cell types. IL-12 is a heterodimeric protein (IL-12-p70; IL-12-p35/p40) consisting of p35 and p40 subunits, and binds to a receptor composed of two subunits, IL-12R-β1 and IL-12R-β2. IL-12 receptor is expressed constitutively or inducibly on a number of immune cells, including NK cells, T, and B lymphocytes. Upon binding of IL-12, the receptor is activated and downstream signaling through the JAK/STAT pathway initiated, resulting in the cellular response to IL-12. IL-12 acts by increasing the production of IFN-γ, which is the most potent mediator of IL-12 actions, from NK and T cells. In addition, IL-12 promotes growth and cytotoxicity of activated NK cells, CD8+ and CD4+ T cells, and shifts the differentiation of CD4+Th0 cells toward the Th1 phenotype. Further, IL-12 enhances of antibody-dependent cellular cytotoxicity (ADCC) against tumor cells and the induction of IgG and suppression of IgE production from B cells. In addition, IL-12 also plays a role in reprogramming of myeloid-derived suppressor cells, directs the Th1-type immune response and helps increase expression of MHC class I molecules (e.g., reviewed in Waldmann et al., Cancer Immunol Res March 2015 3; 219).

[0251] Thus, in some embodiments, the immune modulator is IL-12. In some embodiments, the IL-12 comprises the p35 and p40 subunits. In some embodiments, the interleukin-12 monomer subunits (IL-12A (p35) and IL-12B (p40)) are covalently linked by a linker. In some embodiments, the linker is a serine glycine rich linker. In one embodiment, the 15 amino acid linker of ‘GGGGSGGGGSGGGGS’ (SEQ ID NO: 1247) is inserted between two monomer subunits (IL-12A (p35) and IL-12B (p40) to produce a forced dimer human IL-12 (diIL-12) fusion protein.

[0252] IL-15 displays pleiotropic functions in homeostasis of both innate and adaptive immune system and binds to IL-15 receptor, a heterotrimeric receptor composed of three subunits. The alpha subunit is specific for IL-15, while beta (CD122) and gamma (CD132) subunits are shared with the IL-2 receptor, and allow shared signaling through the JAK/STAT pathways. IL-15 is produced by several cell types, including dendritic cells, monocytes and macrophages. Co-expression of IL-15Rα and IL-15 produced in the same cell, allows intracellular binding of IL-15 to IL-15Rα, which is then shuttled to the cell surface as a complex. Once on the cell surface, then, the IL-15Ra of these cells is able to trans-present IL-15 to IL-15Rβ-γc of CD8 T cells, NK cells, and NK-T cells, which do not express IL-15, inducing the formation of the so-called immunological synapse. Murine and human IL-15Rα, exists both in membrane bound, and also in a soluble form. Soluble IL-15Ra (sIL-15Rα) is constitutively generated from the transmembrane receptor through proteolytic cleavage.

[0253] IL-15 is critical for lymphoid development and peripheral maintenance of innate immune cells and immunological memory of T cells, in particular natural killer (NK) and CD8+ T cell populations. In contrast to IL-2, IL-15 does not promote the maintenance of Tregs and furthermore, IL-15 has been shown to protect effector T cells from IL-2-mediated activation-induced cell death.

[0254] Consequently, delivery of IL-15 is considered a promising strategy for long-term anti-tumor immunity. In a first-in-human clinical trial of recombinant human IL-15, a 10-fold expansion of NK cells and significantly increased the proliferation of γδT cells and CD8+ T cells was observed upon treatment. In addition, IL-15 superagonists containing cytokine-receptor fusion complexes have been developed and are evaluated to increase the length of the response. These include the L-15 N72D superagonist/IL-15RαSushi-Fc fusion complex (IL-15SA/IL-15RαSu-Fc; ALT-803) (Kim et al., 2016 IL-15 superagonist/IL-15RαSushi-Fc fusion complex (IL-15SA/IL-15RαSu-Fc; ALT-803) markedly enhances specific subpopulations of NK and memory CD8+ T cells, and mediates potent anti-tumor activity against murine breast and colon carcinomas).

[0255] Thus, in some embodiments, the immune modulator is IL-15.

[0256] The biological activity of IL-15 is greatly improved by pre-associating IL-15 with a fusion protein IL-15Rα-Fc or by direct fusion with the sushi domain of IL-15Rα (hyper-IL-15) to mimic trans-presentation of IL-15 by cell-associated IL-15Rα. IL-15, either administrated alone or as a complex with IL-15Rα, exhibits potent antitumor activities in animal models (Cheng et al., Immunotherapy of metastatic and autochthonous liver cancer with IL-15/IL-15Rα fusion protein; Oncoimmunology. 2014; 3(11): e963409, and references therein).

[0257] In some embodiments, the immune modulator is IL-15. In some embodiments, the immune modulator is IL-15Ra.

[0258] Interferon gamma (IFNγ or type II interferon), is a cytokine that is critical for innate and adaptive immunity against viral, some bacterial and protozoal infections. IFNγ activates macrophages and induces Class II major histocompatibility complex (MHC) molecule expression. IFNγ can inhibit viral replication and has immunostimulatory and immunomodulatory effects in the immune system. IFNγ is produced predominantly by natural killer (NK) and natural killer T (NKT) cells as part of the innate immune response, and by CD4 Th1 and CD8 cytotoxic T lymphocyte (CTL) effector T cells. Once antigen-specific immunity develops IFNγ is secreted by T helper cells (specifically, Th1 cells), cytotoxic T cells (TC cells) and NK cells only. It has numerous immunostimulatory effects and plays several different roles in the immune system, including the promotion of NK cell activity, increased antigen presentation and lysosome activity of macrophages, activation of inducible Nitric Oxide Synthase iNOS, production of certain IgGs from activated plasma B cells, promotion of Th1 differentiation that leads to cellular immunity. It can also cause normal cells to increase expression of class I MHC molecules as well as class II MHC on antigen-presenting cells, promote adhesion and binding relating to leukocyte migration, and is involved in granuloma formation through the activation of macrophages so that they become more powerful in killing intracellular organisms. Thus, in one embodiment, the immune modulator is IFN-gamma.

[0259] Interleukin-18 (IL-18, also known as interferon-gamma inducing factor) is a proinflammatory cytokine that belongs to the IL-1 superfamily and is produced by macrophages and other cells. IL-18 binds to the interleukin-18 receptor, and together with IL-12 it induces cell-mediated immunity following infection with microbial products like lipopolysaccharide (LPS). Upon stimulation with IL-18, natural killer (NK) cells and certain T helper type 1 cells release interferon-γ (IFN-γ) or type II interferon, which plays a role in activating the macrophages and other immune cells. IL-18 is also able to induce severe inflammatory reactions. Thus, in some embodiments, the immune modulator is IL-18.

[0260] Interleukin-2 (IL-2) is cytokine that regulates the activities of white blood cells (leukocytes, often lymphocytes). IL-2 is part of the body's natural response to microbial infection, and in discriminating between foreign (“non-self”) and “self”. IL-2 mediates its effects by binding to IL-2 receptors, which are expressed by lymphocytes. IL-2 is a member of a cytokine family, which also includes IL-4, IL-7, IL-9, IL-15 and IL-21. IL-2 signals through the IL-2 receptor, a complex consisting of alpha, beta and gamma sub-units. The gamma sub-unit is shared by all members of this family of cytokine receptors. IL-2 promotes the differentiation of T cells into effector T cells and into memory T cells when the initial T cell is stimulated by an antigen. Through its role in the development of T cell immunologic memory, which depends upon the expansion of the number and function of antigen-selected T cell clones, it also has a key role in cell-mediated immunity. IL-2 has been approved by the Food and Drug Administration (FDA) and in several European countries for the treatment of cancers (malignant melanoma, renal cell cancer). IL-2 is also used to treat melanoma metastases and has a high complete response rate. Thus, in some embodiments, the immune modulator is IL-2.

[0261] Interleukin-21 is a cytokine that has potent regulatory effects on certain cells of the immune system, including natural killer (NK) cells and cytotoxic T cells. IL-21 induces cell division/proliferation in its these cells. IL-21 is expressed in activated human CD4+ T cells but not in most other tissues. In addition, IL-21 expression is up-regulated in Th2 and Th17 subsets of T helper cells. IL-21 is also expressed in NK T cells regulating the function of these cells. When bound to IL-21, the IL-21 receptor acts through the Jak/STAT pathway, utilizing Jak1 and Jak3 and a STAT3 homodimer to activate its target genes. IL-21 has been shown to modulate the differentiation programming of human T cells by enriching for a population of memory-type CTL with a unique CD28+CD127hi CD45RO+ phenotype with IL-2 producing capacity. IL-21 also has anti-tumor effects through continued and increased CD8+ cell response to achieve enduring tumor immunity. IL-21 has been approved for Phase 1 clinical trials in metastatic melanoma (MM) and renal cell carcinoma (RCC) patients. Thus, in some embodiments, the immune modulator is IL-21.

[0262] Tumor necrosis factor (TNF) (also known as cachectin or TNF alpha) is a cytokine that can cause cytolysis of certain tumor cell lines and can stimulate cell proliferation and induce cell differentiation under certain conditions. TNF is involved in systemic inflammation and is one of the cytokines that make up the acute phase reaction. It is produced chiefly by activated macrophages, although it can be produced by many other cell types such as CD4+ lymphocytes, NK cells, neutrophils, mast cells, eosinophils, and neurons. The primary role of TNF is in the regulation of immune cells.

[0263] TNF can bind two receptors, TNFR1 (TNF receptor type 1; CD120a; p55/60) and TNFR2 (TNF receptor type 2; CD120b; p75/80). TNFR1 is expressed in most tissues, and can be fully activated by both the membrane-bound and soluble trimeric forms of TNF, whereas TNFR2 is found only in cells of the immune system, and respond to the membrane-bound form of the TNF homotrimer. Upon binding to its receptor, TNF can activate NF-κB and MAPK pathways which mediate the transcription of numerous proteins and mediate several pathways involved in cell differentiation and proliferation, including those pathways involved in the inflammatory response. TNF also regulates pathways that induce cell apoptosis. Thus, in some embodiments, immune modulator modulates dendritic cell activation. In some embodiments, the immune modulator is TNF.

[0264] In some embodiments, the TNF is capable of increasing CCR7 expression on dendritic cells and/or macrophages.

[0265] In some embodiments, the TNFα is capable of activating the NFkappaB pathway, e.g., in cells with TNF receptor. In some embodiments, the TNFα is capable of inducing IkappaBalpha degradation. In some embodiments, TNFα is causes IkappaBalpha degradation.

[0266] In some embodiments, the immune modulator may be any one or more of the described IL-2, IL-15, IL-12, IL-7, IL-21, IL-18, TNF, and IFN-gamma.

[0267] In any of these combination embodiments, the bacteria administered with the immune modulator may further comprise an auxotrophic modification, e.g., a mutation or deletion in DapA, ThyA, or both. In any of these embodiments, the bacteria may further comprise a phage modification, e.g., a mutation or deletion, in an endogenous prophage as described herein.

### Pharmaceutical Compositions and Formulations

[0268] Pharmaceutical compositions comprising the microorganisms and/or immune modulators of the invention may be used to treat, manage, ameliorate, and/or prevent cancer. Pharmaceutical compositions of the invention may be used alone or in combination with prophylactic agents, therapeutic agents, and/or pharmaceutically acceptable carriers are provided.

[0269] In some embodiments, the bacteria are administered systemically or intratumorally as spores. As a non-limiting example, the bacteria are Clostridial strains, and administration results in a selective colonization of hypoxic/necrotic areas within the tumor. In some embodiments, the spores germinate exclusively in the hypoxic/necrotic regions present in solid tumors and nowhere else in the body.

[0270] The pharmaceutical compositions of the invention may be formulated in a conventional manner using one or more physiologically acceptable carriers comprising excipients and auxiliaries, which facilitate processing of the active ingredients into compositions for pharmaceutical use. Methods of formulating pharmaceutical compositions are known in the art (see, e.g., “Remington's Pharmaceutical Sciences,” Mack Publishing Co., Easton, PA). In some embodiments, the pharmaceutical compositions are subjected to tableting, lyophilizing, direct compression, conventional mixing, dissolving, granulating, levigating, emulsifying, encapsulating, entrapping, or spray drying to form tablets, granulates, nanoparticles, nanocapsules, microcapsules, microtablets, pellets, or powders, which may be enterically coated or uncoated. Appropriate formulation depends on the route of administration.

[0271] The compositions may be formulated into pharmaceutical compositions in any suitable dosage form (e.g., liquids, capsules, sachet, hard capsules, soft capsules, tablets, enteric coated tablets, suspension powders, granules, or matrix sustained release formations for oral administration) and for any suitable type of administration (e.g., oral, topical, injectable, intravenous, sub-cutaneous, intratumoral, peritumor, immediate-release, pulsatile-release, delayed-release, or sustained release). Suitable dosage amounts for the bacteria may range from about 10⁴ to 10¹² bacteria. The composition may be administered once or more daily, weekly, or monthly. The composition may be administered before, during, or following a meal. In one embodiment, the pharmaceutical composition is administered before the subject eats a meal. In one embodiment, the pharmaceutical composition is administered currently with a meal. In on embodiment, the pharmaceutical composition is administered after the subject eats a meal.

[0272] The bacteria and/or immune modulator(s) may be formulated into pharmaceutical compositions comprising one or more pharmaceutically acceptable carriers, thickeners, diluents, buffers, buffering agents, surface active agents, neutral or cationic lipids, lipid complexes, liposomes, penetration enhancers, carrier compounds, and other pharmaceutically acceptable carriers or agents. For example, the pharmaceutical composition may include, but is not limited to, the addition of calcium bicarbonate, sodium bicarbonate, calcium phosphate, various sugars and types of starch, cellulose derivatives, gelatin, vegetable oils, polyethylene glycols, and surfactants, including, for example, polysorbate 20. In some embodiments, the bacteria of the invention may be formulated in a solution of sodium bicarbonate, e.g., 1 molar solution of sodium bicarbonate (to buffer an acidic cellular environment, such as the stomach, for example).

[0273] The compositions may be administered intravenously, e.g., by infusion or injection. Alternatively, the compositions may be administered intratumorally and/or peritumorally. In other embodiments, the compositions may be administered intra-arterially, intramuscularly, or intraperitoneally. In some embodiments, the bacteria colonize about 20%, 30%, 40%, 50%, 60%, 70%, 80%, 90% or more of the tumor. In some embodiments, the bacteria and/or immune modulator(s) are co-administered with a PEGylated form of rHuPH20 (PEGPH20) or other agent in order to destroy the tumor septae in order to enhance penetration of the tumor capsule, collagen, and/or stroma.

[0274] The microorganisms and/or immune modulator(s) of the disclosure may be administered via intratumoral injection. Intratumoral injection may elicit a potent localized inflammatory response as well as an adaptive immune response against tumor cells. In some embodiments, the tumor is injected with an 18-gauge multipronged needle (Quadra-Fuse, Rex Medical). The injection site is aseptically prepared. If available, ultrasound or CT may be used to identify a necrotic region of the tumor for injection. If a necrotic region is not identified, the injection can be directed to the center of the tumor. The needle is inserted once into a predefined region, and dispensed with even pressure. The injection needle is removed slowly, and the injection site is sterilized.

[0275] Direct intratumoral injection of the compositions of the invention into solid tumors may be advantageous as compared to intravenous administration. Using an intravenous injection method, only a small proportion of the bacteria may reach the target tumor. For example, following E. coli Nissle injection into the tail vein of 4T1 tumor-bearing mice, most bacteria (>99%) are quickly cleared from the animals and only a small percentage of the administered bacteria colonize the tumor (Stritzker et al., 2007). In particular, in large animals and human patients, which have relatively large blood volumes and relatively small tumors compared to mice, intratumoral injection may be especially beneficial. Injection directly into the tumor allows the delivery of a higher concentration of therapeutic agent and avoids the toxicity, which can result from systemic administration. In addition, intratumoral injection of bacteria induces robust and localized immune responses within the tumor.

[0276] Depending on the location, tumor type, and tumor size, different administration techniques may be used, including but not limited to, cutaneous, subcutaneous, and percutaneous injection, therapeutic endoscopic ultrasonography, or endobronchial intratumor delivery. Prior to the intratumor administration procedures, sedation in combination with a local anesthetic and standard cardiac, pressure, and oxygen monitoring, or full anesthesia of the patient is performed.

[0277] For some tumors, percutaneous injection can be employed, which is the least invasive administration method. Ultrasound, computed tomography (CT) or fluoroscopy can be used as guidance to introduce and position the needle. Percutaneous intratumoral injection is for example described for hepatocellular carcinoma in Lencioni et al., 2010. Intratumoral injection of cutaneous, subcutaneous, and nodal tumors is for example described in WO/2014/036412 (Amgen) for late stage melanoma.

[0278] Single insertion points or multiple insertion points can be used in percutaneous injection protocols. Using a single insertion point, the solution may be injected percutaneously along multiple tracks, as far as the radial reach of the needle allows. In other embodiments, multiple injection points may be used if the tumor is larger than the radial reach of the needle. The needle can be pulled back without exiting, and redirected as often as necessary until the full dose is injected and dispersed. To maintain sterility, a separate needle is used for each injection. Needle size and length varies depending on the tumor type and size.

[0279] In some embodiments, the tumor is injected percutaneously with an 18-gauge multipronged needle (Quadra-Fuse, Rex Medical). The device consists of an 18 gauge puncture needle 20 cm in length. The needle has three retractable prongs, each with four terminal side holes and a connector with extension tubing clamp. The prongs are deployed from the lateral wall of the needle. The needle can be introduced percutaneously into the center of the tumor and can be positioned at the deepest margin of the tumor. The prongs are deployed to the margins of the tumor. The prongs are deployed at maximum length and then are retracted at defined intervals. Optionally, one or more rotation-injection-rotation maneuvers can be performed, in which the prongs are retracted, the needle is rotated by a 60 degrees, which is followed by repeat deployment of the prongs and additional injection.

[0280] Therapeutic endoscopic ultrasonography (EUS) is employed to overcome the anatomical constraints inherent in gaining access to certain other tumors (Shirley et al., 2013). EUS-guided fine needle injection (EUS-FNI) has been successfully used for antitumor therapies for the treatment of head and neck, esophageal, pancreatic, hepatic, and adrenal masses (Verna et al, 2008). EUS-FNI has been extensively used for pancreatic cancer injections. Fine-needle injection requires the use of the curvilinear echoendoscope. The esophagus is carefully intubated and the echoendoscope is passed into the stomach and duodenum where the pancreatic examination occurs, and the target tumor is identified. The largest plane is measured to estimate the tumor volume and to calculate the injection volume. The appropriate volume is drawn into a syringe. A primed 22-gauge fine needle aspiration (FNA) needle is passed into the working channel of the echoendoscope. Under ultrasound guidance, the needle is passed into the tumor. Depending on the size of the tumor, administration can be performed by dividing the tumor into sections and then injecting the corresponding fractions of the volume into each section. Use of an installed endoscopic ultrasound processor with Doppler technology assures there are no arterial or venous structures that may interfere with the needle passage into the tumor (Shirley et al., 2013). In some embodiments, ‘multiple injectable needle’ (MIN) for EUS-FNI can be used to improvement the injection distribution to the tumor in comparison with straight-type needles (Ohara et al., 2013).

[0281] Intratumoral administration for lung cancer, such as non-small cell lung cancer, can be achieved through endobronchial intratumor delivery methods, as described in Celikoglu et al., 2008. Bronchoscopy (trans-nasal or oral) is conducted to visualize the lesion to be treated. The tumor volume can be estimated visually from visible length-width height measurements over the bronchial surface. The needle device is then introduced through the working channel of the bronchoscope. The needle catheter, which consists of a metallic needle attached to a plastic catheter, is placed within a sheath to prevent damage by the needle to the working channel during advancement. The needle size and length varies and is determined according to tumor type and size of the tumor. Needles made from plastic are less rigid than metal needles and are ideal, since they can be passed around sharper bends in the working channel. The needle is inserted into the lesion and the bacteria of the invention are in injected. Needles are inserted repeatedly at several insertion points until the tumor mass is completely perfused. After each injection, the needle is withdrawn entirely from the tumor and is then embedded at another location. At the end of the bronchoscopic injection session, removal of any necrotic debris caused by the treatment may be removed using mechanical dissection, or other ablation techniques accompanied by irrigation and aspiration.

[0282] In some embodiments, the compositions are administrated directly into the tumor using methods, including but not limited to, percutaneous injection, EUS-FNI, or endobronchial intratumor delivery methods. In some cases, other techniques, such as laparoscopic or open surgical techniques are used to access the target tumor, however, these techniques are much more invasive and bring with them much greater morbidity and longer hospital stays.

[0283] In some embodiments, bacteria, e.g., E. coli Nissle, or spores, e.g., Clostridium novyi NT, are dissolved in sterile phosphate buffered saline (PBS) for systemic or intratumor injection.

[0284] The dose to be injected is derived from the type and size of the tumor. The dose of a drug or the bacteria is typically lower, e.g., orders of magnitude lower, than a dose for systemic intravenous administration.

[0285] The volume injected into each lesion is based on the size of the tumor. To obtain the tumor volume, a measurement of the largest plane can be conducted. The estimated tumor volume can then inform the determination of the injection volume as a percentage of the total volume. For example, an injection volume of approximately 20-40% of the total tumor volume can be used.

[0286] For example, as is for example described in WO/2014/036412, for tumors larger than 5 cm in their largest dimension, up to 4 ml can be injected. For tumors between 2.5 and 5 cm in their largest dimension, up to 2 ml can be injected. For tumors between 2.5 and 5 cm in their largest dimension, up to 2 ml can be injected. For tumors between 1.5 and 2.5 cm in their largest dimension, up to 1 ml can be injected. For tumors between 0.5 and 1.5 cm in their largest dimension, up to 0.5 ml can be injected. For tumors equal or small than 0.5 in their largest dimension, up to 0.1 ml can be injected. Alternatively, ultrasound scan can be used to determine the injection volume that can be taken up by the tumor without leakage into surrounding tissue.

[0287] In some embodiments, the treatment regimen will include one or more intratumoral administrations. In some embodiments, a treatment regimen will include an initial dose, which followed by at least one subsequent dose. One or more doses can be administered sequentially in two or more cycles.

[0288] For example, a first dose may be administered at day 1, and a second dose may be administered after 1, 2, 3, 4, 5, 6, days or 1, 2, 3, or 4 weeks or after a longer interval. Additional doses may be administered after 1, 2, 3, 4, 5, 6, days or after 1, 2, 3, or 4 weeks or longer intervals. In some embodiments, the first and subsequent administrations have the same dosage. In other embodiments, different doses are administered. In some embodiments, more than one dose is administered per day, for example, two, three or more doses can be administered per day.

[0289] The routes of administration and dosages described are intended only as a guide. The optimum route of administration and dosage can be readily determined by a skilled practitioner. The dosage may be determined according to various parameters, especially according to the location of the tumor, the size of the tumor, the age, weight and condition of the patient to be treated and the route and method of administration.

[0290] In some embodiments, the bacteria is administered via first route, e.g., intratumoral injection, and the at least one immune modulator is administered via a second route, e.g., orally.

[0291] In some embodiments, the compositions of the disclosure may be administered orally. In some embodiments, the compositions may be useful in the prevention, treatment or management of liver cancer or liver metastases. For example, Danino et al showed that orally administered E. coli Nissle is able to colonize liver metastases by crossing the gastrointestinal tract in a mouse model of liver metastases (Danino et al., Programmable probiotics for detection of cancer in urine. Science Translational Medicine, 7 (289): 1-10, the contents of which is herein incorporated by reference in its entirety).

[0292] In one embodiment, the composition is delivered by intratumor injection. In one embodiment, the composition is delivered intrapleurally. In one embodiment, the composition is delivered subcutaneously. In one embodiment, the composition is delivered intravenously. In one embodiment, the composition is delivered intrapleurally.

[0293] In some embodiments, the compositions may be administered intratumorally according to a regimen which requires multiple injections. In some embodiments, the bacteria and at least one immune modulator are administered together in each intratumoral injection. In some embodiments, a bacteria strain is injected first and an immune modulator is injected at a later timepoint. In other embodiments, an immune modulator is injected first, and a bacteria is injected at a later time point. Additional injections, either concurrently or sequentially, can follow.

[0294] Tumor types into which the bacteria of the current invention are intratumorally delivered include locally advanced and metastatic tumors, including but not limited to, B, T, and NK cell lymphomas, colon and rectal cancers, melanoma, including metastatic melanoma, mycosis fungoides, Merkel carcinoma, liver cancer, including hepatocellular carcinoma and liver metastasis secondary to colorectal cancer, pancreatic cancer, breast cancer, follicular lymphoma, prostate cancer, refractory liver cancer, and Merkel cell carcinoma.

[0295] In some embodiments, tumor cell lysis occurs as part of the intratumor injection. As result, tumor antigens may exposed eliciting an anti-tumor response. This exposure may work together with the effector expressed by the bacteria to enhance the anti-tumor effect. In some embodiments, tumor cell lysis does not occur as part of the intratumor injection.

[0296] Dosage regimens may be adjusted to provide a therapeutic response. Dosing can depend on several factors, including severity and responsiveness of the disease, route of administration, time course of treatment (days to months to years), and time to amelioration of the disease. For example, a single bolus may be administered at one time, several divided doses may be administered over a predetermined period of time, or the dose may be reduced or increased as indicated by the therapeutic situation. The specification for the dosage is dictated by the unique characteristics of the active compound and the particular therapeutic effect to be achieved. Dosage values may vary with the type and severity of the condition to be alleviated. For any particular subject, specific dosage regimens may be adjusted over time according to the individual need and the professional judgment of the treating clinician. Toxicity and therapeutic efficacy of compounds provided herein can be determined by standard pharmaceutical procedures in cell culture or animal models. For example, LD₅₀, ED₅₀, EC₅₀, and IC₅₀ may be determined, and the dose ratio between toxic and therapeutic effects (LD₅₀/ED₅₀) may be calculated as the therapeutic index. Compositions that exhibit toxic side effects may be used, with careful modifications to minimize potential damage to reduce side effects. Dosing may be estimated initially from cell culture assays and animal models. The data obtained from in vitro and in vivo assays and animal studies can be used in formulating a range of dosage for use in humans.

[0297] The ingredients are supplied either separately or mixed together in unit dosage form, for example, as a dry lyophilized powder or water-free concentrate in a hermetically sealed container such as an ampoule or sachet indicating the quantity of active agent. If the mode of administration is by injection, an ampoule of sterile water for injection or saline can be provided so that the ingredients may be mixed prior to administration.

[0298] The pharmaceutical compositions may be packaged in a hermetically sealed container such as an ampoule or sachet indicating the quantity of the agent. In one embodiment, one or more of the pharmaceutical compositions is supplied as a dry sterilized lyophilized powder or water-free concentrate in a hermetically sealed container and can be reconstituted (e.g., with water or saline) to the appropriate concentration for administration to a subject. In an embodiment, one or more of the prophylactic or therapeutic agents or pharmaceutical compositions is supplied as a dry sterile lyophilized powder in a hermetically sealed container stored between 2° C. and 8° C. and administered within 1 hour, within 3 hours, within 5 hours, within 6 hours, within 12 hours, within 24 hours, within 48 hours, within 72 hours, or within one week after being reconstituted. Cryoprotectants can be included for a lyophilized dosage form, principally 0-10% sucrose (optimally 0.5-1.0%). Other suitable cryoprotectants include trehalose and lactose. Other suitable bulking agents include glycine and arginine, either of which can be included at a concentration of 0-0.05%, and polysorbate-80 (optimally included at a concentration of 0.005-0.01%). Additional surfactants include but are not limited to polysorbate 20 and BRIJ surfactants. The pharmaceutical composition may be prepared as an injectable solution and can further comprise an agent useful as an adjuvant, such as those used to increase absorption or dispersion, e.g., hyaluronidase.

[0299] In some embodiments, the composition is formulated for intravenous administration, intratumor administration, or peritumor administration. The composition may be formulated as depot preparations. Such long acting formulations may be administered by implantation or by injection. For example, the compositions may be formulated with suitable polymeric or hydrophobic materials (e.g., as an emulsion in an acceptable oil) or ion exchange resins, or as sparingly soluble derivatives (e.g., as a sparingly soluble salt).

### Methods of Treatment

[0300] Another aspect of the invention provides methods of treating cancer. In some embodiments, the invention provides methods for reducing, ameliorating, or eliminating one or more symptom(s) associated with cancer. In some embodiments, the cancer is selected from adrenal cancer, adrenocortical carcinoma, anal cancer, appendix cancer, bile duct cancer, bladder cancer, bone cancer (e.g., Ewing sarcoma tumors, osteosarcoma, malignant fibrous histiocytoma), brain cancer (e.g., astrocytomas, brain stem glioma, craniopharyngioma, ependymoma), bronchial tumors, central nervous system tumors, breast cancer, Castleman disease, cervical cancer, colon cancer, rectal cancer, colorectal cancer, endometrial cancer, esophageal cancer, eye cancer, gallbladder cancer, gastrointestinal cancer, gastrointestinal carcinoid tumors, gastrointestinal stromal tumors, gestational trophoblastic disease, heart cancer, Kaposi sarcoma, kidney cancer, laryngeal cancer, hypopharyngeal cancer, leukemia (e.g., acute lymphoblastic leukemia, acute myeloid leukemia, chronic lymphocytic leukemia, chronic myelogenous leukemia), liver cancer, lung cancer (e.g., small cell lung cancer, non-small cell lung cancer), lymphoma (e.g., AIDS-related lymphoma, Burkitt lymphoma, cutaneous T cell lymphoma, Hodgkin lymphoma, Non-Hodgkin lymphoma, primary central nervous system lymphoma), malignant mesothelioma, multiple myeloma, myelodysplastic syndrome, nasal cavity cancer, paranasal sinus cancer, nasopharyngeal cancer, neuroblastoma, oral cavity cancer, oropharyngeal cancer, osteosarcoma, ovarian cancer, pancreatic cancer, penile cancer, pituitary tumors, prostate cancer, retinoblastoma, rhabdomyosarcoma, rhabdoid tumor, salivary gland cancer, sarcoma (e.g., liposarcoma, chondrosarcoma), skin cancer (e.g., basal cell carcinoma, melanoma, squamous cell carcinoma), small intestine cancer, stomach cancer, teratoid tumor, testicular cancer, throat cancer, thymus cancer, thyroid cancer, unusual childhood cancers, urethral cancer, uterine cancer, uterine sarcoma, vaginal cancer, vulvar cancer, Waldenström macroglobulinemia, and Wilms tumor. In some embodiments, the symptom(s) associated thereof include, but are not limited to, anemia, loss of appetite, irritation of bladder lining, bleeding and bruising (thrombocytopenia), changes in taste or smell, constipation, diarrhea, dry mouth, dysphagia, edema, fatigue, hair loss (alopecia), infection, infertility, lymphedema, mouth sores, nausea, pain, peripheral neuropathy, tooth decay, urinary tract infections, and/or problems with memory and concentration.

[0301] The method may comprise preparing a pharmaceutical composition with at least one species, strain, or subtype of bacteria and/or immune modulator described herein, and administering the pharmaceutical composition to a subject in a therapeutically effective amount. The composition may be administered locally, e.g., intratumorally or peritumorally into a tissue or supplying vessel, or systemically, e.g., intravenously by infusion or injection. In some embodiments, the compositions are administered intravenously, intratumorally, intra-arterially, intramuscularly, intraperitoneally, orally, or topically. In some embodiments, the compositions are administered intravenously, i.e., systemically.

[0302] In some embodiments, the recombinant microorganism is administered to the subject at a suitable dose. Examples include administered to the subject at a dose of about 1×10⁶, about 3×10⁶, about 1×10⁷, about 3×10⁷, about 1×10⁸, about 3×10⁸, and about 1×10⁹ live cells. In some embodiments, a suitable dose may be selected from about 1×10⁶ to about 3×10⁶, from about 3×10⁶ to about 1×10⁷, from about 1×10⁷ to about 3×10⁷, from about 3×10⁷ to about 1×10⁸, from about 1×10⁸ to about 3×10⁸, and from about 3×10⁸ to about 1×10⁹ live cells. Accordingly, methods for treating a solid tumor are provided herein, comprising administering to a subject in need thereof an effective amount of an a recombinant microorganism capable of expressing a stimulator of interferon gene (STING) agonist and wherein the microorganism is administered to the subject at a dose of about 1×10⁶, about 3×10⁶, about 1×10⁷, about 3×10⁷, about 1×10⁸, about 3×10⁸, and about 1×10¹ live cells. In some embodiments, a suitable dose may be selected from about 1×10⁶ to about 3×10⁶, from about 3×10⁶ to about 1×10⁷, from about 1×10⁷ to about 3×10⁷, from about 3×10⁷ to about 1×10⁸, from about 1×10⁸ to about 3×10⁸, and from about 3×10⁸ to about 1×10⁹ live cells. In some embodiments, recombinant microorganism is administered to the subject once weekly, once every two weeks, or once every three weeks. In some embodiments, the recombinant microorganism is administered to the subject once weekly. In some embodiments, the recombinant microorganism is administered to the subject once every three weeks. In some embodiments, the administering is intratumoral injection. In some embodiments, the recombinant microorganism is administered for at least 3 weeks, at least 6 weeks, at least 2 months, at least 4 months, at least 6 months, at least 8 months, at least 10 months, at least 12 months, at least 14 months, at least 16 months, at least 18 months, at least 20 months, at least 22 months, or at least 24 months. In some embodiments, the recombinant microorganism is administered for at least 24 months. One specific embodiment, the microorganism is administered in four 21-day cycles. In some embodiments, the number of administrations differs between cycles. For example, a subject may receive a dose, e.g., intratumorally, of the microorganism on days 1, 8, and 15 of Cycle 1 and Day 1 of Cycles 2 through 4. In some embodiments, the solid tumor is a lymphoma, melanoma, liposarcoma, sarcoma, small cell lung cancer, squamous cell carcinoma, or chondrosarcoma. In some embodiments, the STING agonist is c-diAMP, c-GAMP, or c-diGMP. In some embodiments, the STING agonist is c-diAMP. In some embodiments, the recombinant microorganism expresses at least one non-native gene sequence encoding an enzyme capable of producing the STING agonist. In some embodiments, the at least one non-native gene sequence is dacA or cGAS. In some embodiments, the non-native gene sequence is integrated into a chromosome of the microorganism. Alternatively, the at least one non-native gene sequence is present on a plasmid in the microorganism. In some embodiments, the at least one non-native gene sequence encoding the enzyme capable of producing the STING agonist is operably linked to a constitutive promoter. In some embodiments, the at least one non-native gene sequence encoding the enzyme capable of producing the STING agonist is operably linked to an inducible promoter, for example, a low-oxygen or anaerobic conditions, by the hypoxic environment of a tumor, or temperature. In some embodiments, the recombinant microorganism further comprises one or more auxotrophies and/or one or more endogenous phage deletions. In one embodiment, the recombinant microorganism is an auxotroph in dapA, thyA, or both dapA and thyA. In one embodiment, the recombinant microorganism is non-pathogenic to the subject. In one example, the recombinant microorganism is Escherichia coli Nissle. In any of these embodiments, the methods may further provide co-administration with a checkpoint inhibitor, e.g., an anti-Pd1 antibody such as atezolizumab, as described herein.

[0303] In certain embodiments, administering the pharmaceutical composition to the subject reduces cell proliferation, tumor growth, and/or tumor volume in a subject. In some embodiments, the methods of the present disclosure may reduce cell proliferation, tumor growth, and/or tumor volume by at least about 10% to 20%, 20% to 25%, 25% to 30%, 30% to 40%, 40% to 50%, 50% to 60%, 60% to 70%, 70% to 75%, 75% to 80%, 80% to 85%, 85% to 90%, 90% to 95%, 95% to 99%, or more as compared to levels in an untreated or control subject. In some embodiments, reduction is measured by comparing cell proliferation, tumor growth, and/or tumor volume in a subject before and after administration of the pharmaceutical composition. In some embodiments, the method of treating or ameliorating a cancer in a subject allows one or more symptoms of the cancer to improve by at least about 10%, 20%, 30%, 40%, 50%, 60%, 70%, 80%, 90%, 95%, or more.

[0304] Before, during, and after the administration of the pharmaceutical composition, cancerous cells and/or biomarkers in a subject may be measured in a biological sample, such as blood, serum, plasma, urine, peritoneal fluid, and/or a biopsy from a tissue or organ. In some embodiments, the methods may include administration of the compositions of the invention to reduce tumor volume in a subject to an undetectable size, or to less than about 1%, 2%, 5%, 10%, 20%, 25%, 30%, 40%, 50%, 60%, 70%, 75%, 80%, or 90% of the subject's tumor volume prior to treatment. In other embodiments, the methods may include administration of the compositions of the invention to reduce the cell proliferation rate or tumor growth rate in a subject to an undetectable rate, or to less than about 1%, 2%, 5%, 10%, 20%, 25%, 30%, 40%, 50%, 60%, 70%, 75%, 80%, or 90% of the rate prior to treatment.

[0305] In certain embodiments, administering the pharmaceutical composition to the subject upregulates cytokines found in blood and serum. In some embodiments, the blood and serum cytokines are IL-6, TNFα, IFNγ, and/or IL-1Ra. In some embodiments, the serum and blood cytokines are upregulated in a dose dependent manner. In other embodiments, serum and blood cytokines are upregulated about 2-fold, about 3-fold, about 4-fold, or about 5-fold more than expression prior to treatment.

[0306] In certain embodiments, administering the pharmaceutical composition to the subject upregulates expression of interferon stimulated genes, chemokine and/or cytokine genes, and T cell function genes. In some embodiments the interferon stimulated genes are ISG15 (interferon stimulated gene), IFIT1, and/or IFIT2, the chemokine and/or cytokines are CXCL9, CXCL10, TNFRS1B, and/or TNFSF10, and the T cell function genes are Granzyme A (GZMA), CD4, PD-L2. In some embodiments, interferon stimulated genes, chemokine and/or cytokine genes, and T cell function genes are upregulated about 2-fold, about 3-fold, or about 4-fold.

[0307] Response patterns may be different than for traditional cytotoxic therapies. For example, tumors treated with immune-based therapies may enlarge before they regress, and/or new lesions may appear (Agarwala et al., 2015). Increased tumor size may be due to heavy infiltration with lymphocytes and macrophages that are normally not present in tumor tissue. Additionally, response times may be slower than response times associated with standard therapies, e.g., cytotoxic therapies. In some embodiments, delivery of the immune modulator may modulate the growth of a subject's tumor and/or ameliorate the symptoms of a cancer while temporarily increasing the volume and/or size of the tumor.

[0308] The recombinant bacteria may be destroyed, e.g., by defense factors in tissues or blood serum (Sonnenborn et al., 2009), or by activation of a kill switch, several hours or days after administration. Thus, the pharmaceutical composition may be re-administered at a therapeutically effective dose and frequency. In alternate embodiments, the bacteria are not destroyed within hours or days after administration and may propagate in the tumor and colonize the tumor.

[0309] The pharmaceutical composition may be administered alone or in combination with one or more additional therapeutic agents, e.g., a chemotherapeutic drug or a checkpoint inhibitor, e.g., as described herein and known in the art. An important consideration in selecting the one or more additional therapeutic agents is that the agent(s) should be compatible with the bacteria of the invention, e.g., the agent(s) must not kill the bacteria. In some studies, the efficacy of anticancer immunotherapy, e.g., CTLA-4 or PD-1 inhibitors, requires the presence of particular bacterial strains in the microbiome (Ilda et al., 2013; Vetizou et al., 2015; Sivan et al., 2015). In some embodiments, the pharmaceutical composition comprising the bacteria augments the effect of a checkpoint inhibitor or a chemotherapeutic agent, e.g., allowing lowering of a the dose of systemically administrated chemotherapeutic or immunotherapeutic agents. In some embodiments, the pharmaceutical composition is administered with one or more commensal or probiotic bacteria, e.g., Bifidobacterium or Bacteroides.

[0310] In certain embodiments, the pharmaceutical composition may be administered to a subject for treating cancer by administering a bacterium to the subject, and administering at least one immune modulator to the subject. In some embodiments, the administering steps are performed at the same time. In some embodiments, administering the bacterium to the subject occurs before the administering of the at least one immune modulator to the subject. In some embodiments, administering of the at least one immune modulator to the subject occurs before the administering of the bacterium to the subject.

[0311] In some embodiments, subject to be treated by the methods disclosed herein meets one or more of the inclusion and exclusion criteria disclosed the examples below. For example, the subject may be (1) aged ≥18 years having a histologically- or cytologically-confirmed stage III or IV advanced/metastatic solid tumor or lymphoma for which no therapeutic options are available to extend survival or for which the patient is not a candidate for standard-of-care therapy, (2) having Eastern Cooperative Oncology Group performance status ≤1, (3) having a life expectancy ≥3 months, (4) having lesions ≥1 injectable, measurable (≥10 mm in diameter, or ≥15 mm for nodal lesions), having an eligible lesion as defined by RECIST 1.1 (Eisenhauer et al 2009), iRECIST (Seymour et al 2017), and/or LYRIC (Cheson et al 2016) and as assessed by the Investigator. (5) having Oxygen saturation ≥90% without the use of supplemental oxygen, (6) having adequate cardiac function. Alternatively or in addition the subject may have laboratory values within the following ranges: Absolute neutrophil count ≥1500/μL; Lymphocyte count ≥500/μL; Platelets ≥100,000/μL without transfusion; Hemoglobin ≥9.0 g/dL (patients may be transfused to meet this criterion); Estimated glomerular filtration rate (eGFR) ≥50 m/min/1.73 m2 per the Cockcroft-Gault formula; Total bilirubin ≤1.5×the upper limit of normal (ULN) OR direct bilirubin ≤ULN for participants with total bilirubin levels ≥1.5×ULN or ≤3×ULN for patients with Gilbert's syndrome; AST, ALT, and alkaline phosphatase ≤2.5×ULN (AST and ALT≤5×ULN for participants with liver metastases and alkaline phosphatase ≤5×ULN for participants with liver or bone metastases); International normalized ratio (INR) or PT or aPTT≤1.5×ULN unless participant is receiving anticoagulant therapy as long as PT or aPTT is within therapeutic range of intended use of anticoagulants.

[0312] When the microorganism is combined with checkpoint inhibitorthereay, additional inclusion criteria may apply. For example, TSH must be within the normal reference range or the subject must be receiving stable thyroid replacement therapy. In some embodiments, Patients have received previous treatment with an anti-PD-1/L1 monoclonal antibody (mAb) administered either as monotherapy, or in combination with other CPIs or other therapies. In some embodiments, e.g., if CPI therapy is not indicated as a part of standard-of-care therapy, the subject may be CPI naïve.

[0313] Additional inclusion criteria that apply only to the microorganism-CPI combination therapy include having progressed on treatment with an anti-PD-1/L1 mAb administered either as monotherapy, or in combination with other CPIs or other therapies, if indicated or if CPI therapy is not indicated as a part of standard-of-care therapy, being be CPI naïve.

### Chemotherapeutic Agents

[0314] In some embodiments, the pharmaceutical compositions are administered sequentially, simultaneously, or subsequently to dosing with one or more chemotherapeutic agents. In some embodiments, the pharmaceutical compositions are administered sequentially, simultaneously, or subsequently to dosing with one or more chemotherapeutic agents selected from Trabectedin®, Belotecan®, Cisplatin®, Carboplatin®, Bevacizumab®, Pazopanib®, 5-Fluorouracil, Capecitabine®, Irinotecan®, and Oxaliplatin®. In some embodiments, the pharmaceutical compositions are administered sequentially, simultaneously, or subsequently to dosing with gemcitabine (Gemzar). In some embodiments, the pharmaceutical compositions are administered sequentially, simultaneously, or subsequently to dosing with cyclophosphamide. In any of these embodiments, the one or more bacteria are administered systemically or orally or intratumorally.

[0315] In some embodiments, one or more pharmaceutical compositions are administered sequentially, simultaneously, or subsequently to dosing with one or more chemotherapeutic agents. In some embodiments, the chemotherapeutic agent is administered systemically, and the bacteria are administered intratumorally. In some embodiments, the chemotherapeutic agent and pharmaceutical composition are administered systemically. In one embodiment, the chemotherapeutic agent is cyclophosphamide.

[0316] In some embodiments, the pharmaceutical compositions are able to improve anti-tumor activity (e.g., tumor proliferation, size, volume, weight) of the co-administered chemotherapeutic agent (e.g., cyclophosphamide or another agent described herein or known in the art), e.g., by 10% to 20%, 20% to 25%, 25% to 30%, 30% to 40%, 40% to 50%, 50% to 60%, 60% to 70%, 70% to 75%, 75% to 80%, 80% to 85%, 85% to 90%, 90% to 95%, 95% to 99%, or more as compared to a chemotherapy alone under the same conditions. In some embodiments, the pharmaceutical compositions are able to improve anti-tumor activity (e.g., tumor proliferation, size, volume, weight) of the co-administered chemotherapeutic agent (e.g., cyclophosphamide or another agent described herein or known in the art), e.g., 1.0-1.2-fold, 1.2-1.4-fold, 1.4-1.6-fold, 1.6-1.8-fold, 1.8-2-fold, or two-fold more or more as compared to a chemotherapy alone.

### Checkpoint Inhibition

[0317] In certain embodiments, the pharmaceutical compositions are administered sequentially, simultaneously, or subsequently to dosing with one or more checkpoint inhibitors, immune stimulatory antibodies (inhibitory or agonistic) or other agonists known in the art or described herein. In certain embodiments, the pharmaceutical compositions are administered sequentially, simultaneously, or subsequently to dosing with one checkpoint inhibitors, immune stimulatory antibodies (inhibitory or agonistic) or other agonists known in the art or described herein. In certain embodiments, the pharmaceutical compositions are administered sequentially, simultaneously, or subsequently to dosing with two checkpoint inhibitors, immune stimulatory antibodies (inhibitory or agonistic) or other agonists known in the art or described herein.

[0318] Non-limiting examples of immune checkpoint inhibitors include CTLA-4 antibodies (including but not limited to Ipilimumab and Tremelimumab (CP675206)), anti-4-iBB (CD137, TNFRSF9) antibodies (including but not limited to PF-05082566, and Urelumab), anti CD134 (OX40) antibodies, including but not limited to Anti-OX40 antibody (Providence Health and Services), anti-PD-1 antibodies (including but not limited to Nivolumab, Pidilizumab, Pembrolizumab (MK-3475/SCH900475, lambrolizumab, REGN2810, PD-1 (Agenus)), dostarlimab, anti-PD-L1 antibodies (including but not limited to durvalumab (MEDI4736), avelumab (MSB0010718C), and atezolizumab (MPDL3280A, RG7446, R05541267)), and anti-KIR antibodies (including but not limited to Lirilumab), LAG3 antibodies (including but not limited to BMS-986016), anti-CCR4 antibodies (including but not limited to Mogamulizumab), anti-CD27 antibodies (including but not limited to Varlilumab), anti-CXCR4 antibodies (including but not limited to Ulocuplumab). In some embodiments, the at least one bacterial cell is administered sequentially, simultaneously, or subsequently to dosing with an anti-phosphatidyl serine antibody (including but not limited to Bavituxumab).

[0319] In some embodiments, the pharmaceutical compositions are administered sequentially, simultaneously, or subsequently to dosing with one or more antibodies selected from TLR9 antibody (including, but not limited to, MGN1703 PD-1 antibody (including, but not limited to, SHR-1210 (Incyte/Jiangsu Hengrui)), anti-OX40 antibody (including, but not limited to, OX40 (Agenus)), anti-Tim3 antibody (including, but not limited to, Anti-Tim3 (Agenus/INcyte)), anti-Lag3 antibody (including, but not limited to, Anti-Lag3 (Agenus/INcyte)), anti-B7H3 antibody (including, but not limited to, Enoblituzumab (MGA-271), anti-CT-011 (hBAT, hBAT1) as described in WO2009101611, anti-PDL-2 antibody (including, but not limited to, AMP-224 (described in WO2010027827 and WO2011066342)), anti-CD40 antibody (including, but not limited to, CP-870, 893), anti-CD40 antibody (including, but not limited to, CP-870, 893).

[0320] In one embodiment, the microorganism or the pharmaceutical composition comprising the microorganism is administered in combination with nivolumab. In some embodiments, nivolumab is administered at a flat dose of 240 mg every two weeks. In some embodiments, the microorganism is administered in combination with prembrolizumab. In some embodiments, prembrolizumab is administered at a flat doso of 400 mg every six weeks for pembrolizumab or alternatively at a flat does of 200 mg every three weeks.

[0321] In one embodiment, the microorganism or the pharmaceutical composition comprising the microorganism is administered in combination with atezolizumab. In one embodiment, atezolizumab is administered in accordance with its recommended dose and schedule. In one embodiment, atezolizumab is administered as a flat dose of 1200 mg as an intravenous infusion over 60 minutes every 3 weeks. For example, atezolizumab may be administered in accordance with its recommended dose and schedule (1200 mg IV Q3W) on Day 1 of each of cycles of administration of the recombinant microorganism. In some embodiments, the administration regimen comprises 4 cycles, e.g., of 21 days. In some embodiments, when a checkpoint inhibitor, e.g., atezolizumab, and the recombinanat microorganism are both administered on the same day, the recombinanat microorganism will be administered first, followed by at least 1 hour of observation prior to the checkpoint inhibitor infusion, e.g., atezolizumab infusion. In some instances, patients receiving a combination treatment with a checkpoint inhibitor, e.g., atezolizumab, and who do not have progressive disease (i.e., those who achieve and sustain CR, PR, or SD) at the end of Cycle 4 on combination therapy may receive additional cycles of SYNB1891 and atezolizumab for up to 24 months (i.e., Cycles 5 to 35) after the initial dose of study treatment until documentation of progressive disease or other discontinuation criteria, satisfaction of a predefined study stopping rule, or no eligible lesions remain.

[0322] Accordingly, methods for treating a solid tumor are provided herein, comprising administering to a subject in need thereof an effective amount of an a recombinant microorganism capable of expressing a stimulator of interferon gene (STING) agonist in combination with a checkpoint inhibitor, e.g., an anti-Pd1 antibody, e.g., atezolizumab, prembrolizomb or nivolumab or others known in the art and wherein the microorganism is administered to the subject at a dose of about 1×10⁶, about 3×10⁶, about 1×10⁷, about 3×10⁷, about 1×10⁸, about 3×10⁸, and about 1×10⁹ live cells. In some embodiments, a suitable dose may be selected from about 1×10⁶ to about 3×10⁶, fro 3×10⁶ to about 1×10⁷, from 1×10⁷, to about 3×10⁷, from 3×10⁷ to about 1×10⁸, from 1×10⁸ to about 3×10⁸, and from 3×10⁸ to about 1×10⁹ live cells. In some embodiments, recombinant microorganism is administered to the subject once weekly, once every two weeks, or once every three weeks. In some embodiments, the recombinant microorganism is administered to the subject once weekly. In some embodiments, the recombinant microorganism is administered to the subject once every three weeks. In some embodiments, the administering is intratumoral injection. In some embodiments, the recombinant microorganism is administered for at least 3 weeks, at least 6 weeks, at least 2 months, at least 4 months, at least 6 months, at least 8 months, at least 10 months, at least 12 months, at least 14 months, at least 16 months, at least 18 months, at least 20 months, at least 22 months, or at least 24 months. In some embodiments, the recombinant microorganism is administered for at least 24 months. One specific embodiment, the microorganism is administered in four 21-day cycles. In some embodiments, the number of administrations differs between cycles. For example, a subject may receive a dose, e.g., intratumorally, of the microorganism on days 1, 8, and 15 of Cycle 1 and Day 1 of Cycles 2 through 4.

### Co-Stimulatory Molecules

[0323] In certain embodiments, one or more bacteria and/or immune modulators are administered sequentially, simultaneously, or subsequently to dosing with one or more agonistic immune stimulatory molecules or agonists, including but not limited to, agonistic antibodies.

[0324] In some embodiments, the one or more antibodies are selected from anti-OX40 antibody (including, but not limited to, INCAGN01949 (Agenus); BMS 986178 (Bristol-Myers Squibb), MED10562 (Medimmune), GSK3174998 (GSK), PF-04518600 (Pfizer)), anti-41BB/CD137 (including but not limited to PF-05082566 (Pfizer), urelumab (BMS-663513; Bristol-Myers Squibb), and anti-GITR (including but not limited to TRX518 (Leap Therapeutics), MK-4166 (Merck), MK-1248 (Merck), AMG 228 (Amgen), BMS-986156 (BMS), INCAGN01876 (Incyte/Agenus), MEDI1873 (AZ), GWN323 (NVS).

[0325] In some embodiments, the microorganisms and/or immune modulators may be administered as part of a regimen, which includes other treatment modalities or combinations of other modalities. Non-limiting examples of these modalities or agents are conventional therapies (e.g., radiotherapy, chemotherapy), other immunotherapies, stem cell therapies, and targeted therapies, (e.g., BRAF or vascular endothelial growth factor inhibitors; antibodies or compounds), bacteria described herein, and oncolytic viruses. Therapies also include related to antibody-immune engagement, including Fc-mediated ADCC therapies, therapies using bispecific soluble scFvs linking cytotoxic T cells to tumor cells (e.g., BiTE), and soluble TCRs with effector functions. Immunotherapies include vaccines (e.g., viral antigen, tumor associated antigen, neoantigen, or combinations thereof), checkpoint inhibitors, cytokine therapies, adoptive cellular therapy (ACT). ACT includes but is not limited to, tumor infiltrating lymphocyte (TIL) therapies, native or engineered TCR or CAR-T therapies, natural killer cell therapies, and dendritic cell vaccines or other vaccines of other antigen presenting cells. Targeted therapies include antibodies and chemical compounds, and include for example antiangiogenic strategies and BRAF inhibition.

[0326] The immunostimulatory activity of bacterial DNA is mimicked by synthetic oligodeoxynucleotides (ODNs) expressing unmethylated CpG motifs. Bode et al., Expert Rev Vaccines. 2011 April; 10(4): 499-511. CpG DNA as a vaccine adjuvant. When used as vaccine adjuvants, CpG ODNs improve the function of professional antigen-presenting cells and boost the generation of humoral and cellular vaccine-specific immune responses. In some embodiments, CpG can be administered in combination with the bacteria of the invention.

[0327] In one embodiment, the microorganisms are administered in combination with tumor cell lysates.

[0328] The dosage of the pharmaceutical composition and the frequency of administration may be selected based on the severity of the symptoms and the progression of the cancer. The appropriate therapeutically effective dose and the frequency of administration can be selected by a treating clinician.

### EXAMPLES

[0329] The following examples provide illustrative embodiments of the disclosure. One of ordinary skill in the art will recognize the numerous modifications and variations that may be performed without altering the spirit or scope of the disclosure. Such modifications and variations are encompassed within the scope of the disclosure. The Examples do not in any way limit the disclosure.

[0330] The disclosure provides herein a sequence having at least about 80%, at least about 85%, at least about 90%, at least about 95%, or at least about 99% homologous to the sequence any of the SEQ ID NOs described in the Examples, below.

### Example 1. Intratumoral Injection of SYNB1891: Interim Clinical Trial Analysis

[0331] SYNB1891 is a live, modified strain of the probiotic E. coli Nissle engineered to produce cyclic dinucleotides under hypoxia leading to stimulator of interferon genes (STING)-activation in phagocytic antigen-presenting cells in tumors and activating complementary innate immune pathways. As used herein, SYNB comprises a bacterial chassis: a wild-type E. coli Nissle strain containing dual auxotrophies for diaminopimelic acid and thymidine, and deletion of an endogenous phage, and SYNB1891 comprises the SYNB Nissle strain plus an FNR-inducible dacA from Listeria monocytogenes integrated into the genome to produce the STING agonist ci-di-AMP.

[0332] This first-in-human study (NCT04167137; see Example 4 for details) is enrolling patients with refractory advanced solid tumors or lymphoma to receive an intratumoral (IT) injection of SYNB1891 on Days 1, 8 and 15 of the first 21-day cycle and then on Day 1 of each subsequent cycle. Dose escalation is planned across 7 cohorts (1×10⁶-1×10⁹ live cells) with Arm 1 consisting of escalating doses of SYNB1891 as monotherapy, and Arm 2 in combination with atezolizumab. The primary objective is to determine the single-agent maximum tolerated dose as monotherapy and the recommended Phase 2 dose in combination with atezolizumab. Other objectives include SYNB1891 kinetics in blood and the injected tumor, STING-target engagement as assessed by IT gene expression and serum cytokines, and tumor responses.

[0333] This interim analysis includes the first 11 patients across 4 cohorts dosed at 1×10⁶, 3×10⁶, 1×10⁷, or 3×10⁷ live cells, with a total of 59 doses administered. The mean (range) age was 56 (25-70); 9 patients were female. There were no DLTs, SYNB1891-related infections or discontinuations due to adverse events. There was one SYNB1891-related serious adverse event in a patient who experienced a grade 2 cytokine release syndrome that resolved within one day, and one patient experienced a grade 2 injection site reaction of erythema which resolved. SYNB1891 was not detected in the blood at 6 or 24 hours after the first dose or intratumorally 7 days following the first dose. Treatment with SYNB1891 demonstrated activation of the STING pathway and target engagement as assessed by upregulation of interferon-stimulated genes (ISG15, IFIT1, IFIT2; FIGS. 2A-2B and 4A-4B), chemokines/cytokines (CXCL9, CXCL10, TNFRS1B, TNFSF10; FIGS. 3A-3B) and T-cell response genes (GZMA, CD4, PD-L2; FIGS. 3C and 4A-4B) in core biopsies obtained pre-dose and 7 days following the third weekly dose. CXCL-9/10/11 upregulation which stimulates immune cells migration into tumor: Th1 cells, CTLs, NK cells. In addition, there was a dose-response increase in serum cytokines, IL-6 (FIG. 1A), TNFα (FIG. 1B), IFNγ (FIG. 1C), IL-1Rα (FIG. 1D), at dose levels of 1×10⁷ and 3×10⁷ live cells at 6 hours post-dose. Durable, stable disease was observed in two patients refractory to prior PD-1/L1 antibodies with vulvar melanoma (1×10⁶ live cells; FIGS. 5A-5B) and small cell lung cancer (1×10⁷ live cells; FIGS. 6A-6B).

[0334] A 63 year-old female with vulvar melanoma and dosed with 1×10⁶ live cells (FIGS. 5A-5B). The patient previously received local resection and nivolumab. The tumor was genotyped as comprising KIT/PDGFRA/KDR amplification and an ATM deletion.

[0335] A 55 year-old female with small cell lung cancer was dosed with 1×10⁷ live cells (FIGS. 6A-6B). The patient previously was treated with etoposide/carboplatin, pegzilarginase, and pembrolizumab.

[0336] After approximately 220 days after treatment, the patient with vulvar melanoma and treated with 1×10⁶ live cells and the patient with small cell lung cancer treated with 1×10⁷ live cells had durable, stable disease. Patients with basal cell cancer (treated with 3×10⁶ live cells), squamous cell cancer (treated with 3×10⁷ live cells), bone chondrosarcoma cancer (treated with 1×10⁷ live cells), liposarcoma cancer (treated with 1×10⁶ live cells), sarcoma (breast) cancer (treated with 3×10⁶ live cells), bile duct adeno cancer (treated with 1×10⁷ live cells), esophageal adeno cancer (treated with 1×10⁶ live cells), esophageal cancer (treated with 3×10⁶ live cells), and vulvar squamous cell cancer (treated with 3×10⁷ live cells) were also treated with SYNB1891.

[0337] RECIST refers to the Response Evaluation Criteria in Solid Tumors. The patient with vulvar melanoma had 28% RECIST and the patient with small cell lung cancer had 12% RECIST.

[0338] Repeat IT injection of SYNB1891 as monotherapy is safe and well-tolerated up to at least 3×10⁷ cells and shows evidence of STING pathway target engagement. These data support the continued dose escalation of SYNB1891 as monotherapy, and initiation of Arm 2 in combination with atezolizumab.

[0339] Current enrollment includes 22 patients across 4 sites in the U.S. Patients will be dosed with 1×10⁶ to 1×10⁸ live cells. Patients receiving a combination therapy will receive 1×10⁷ live cells. Tumor types include Tumor types: melanoma [4], sarcoma [4], esophageal [4], squamous (including 2 head and neck) [4], colon/colorectal [2]; small cell lung, basal cell, bile duct adeno, and jejunum adeno.

### Example 2: Immunohistochemistry after Administration of SYNB1891

[0340] Multiplex immunofluorescence staining of samples from patients with vulvar melanoma (100-002), liposarcoma (200-003), small cell lung cancer (600-002), and chondrosarcoma of the bone (100-005) showed a change in protein expression in T cells and APC compartment in tumor cells after treatment with SYNB1891. An 8-panel from Ultivue was used to stain for CD4, CD8, Foxp3, Granzyme B, Ki67, PD-L1, MHCII, CD11c (Table 7).

TABLE 7
Markers for Multiplex Immunofluorescence Staining

| Marker | Main Cell Type | Function |
|---|---|---|
| CD4 | Helper T-cell | T-helper cells play an important |
| | | in regulating the immune response. |
| | | The main cell type expressing CD4 is |
| | | mature helper T cells. |
| CD8 | Cytotoxic T cells | Cytotoxic T cells are responsible for |
| | | mediating apoptosis of cancer cells |
| | | through the release of perforin and |
| | | Granzyme B. |
| FoxP3 | Regulatory T cell | Regulatory T cells expressing FoxP3 |
| | | (main Treg transcription factor) |
| | | generally decrease the immune response |
| Granzyme | Cytotoxic T | Granzyme B is produced, stored, and |
| B | cells & NK cells | released by cytotoxic cells to mediate |
| | | cellular death in combination |
| | | with Perforin. |
| Ki67 | Proliferating | Ki67 is expressed within the nucleus |
| | cells | during the phases of mitosis and is |
| | | strongly associated with cell |
| | | proliferation. |
| PD-L1 | Checkpoint | Allows cells to escape immune |
| | protein | surveillance by binding to PD-1. |
| MHC II | Professional | MHC Class II is responsible for the |
| | antigen-presenting | presentation of pathogenic epitopes |
| | cells | to the immune system. |
| CD11c | Dendritic cells | Dendritic cells modulate T cell, B |
| | | cell, monocyte/macrophage function |
| | | to link innate and adaptive immunity |

[0341] FIGS. 7A-7H show representative images from patients with vulvar melanoma (100-002), liposarcoma (200-003), small cell lung cancer (600-002), and chondrosarcoma of the bone (100-005). Heat map of expression based on multiplex immunofluorescence staining is shown in FIGS. 8A and 8B. Quantification of cells with specific markers are shown in FIGS. 9A-9K. Percent CD4+ cells in a tumor area (FIG. 9A) and percent CD8+ cells in a tumor area (FIG. 9B) represent the T cell compartment. Percent CD11c/MHCII+ cells in a tumor area (FIG. 9C) and percent CD11c/PDL-1+ cells in a tumor area (FIG. 9D) represent the APC compartment. Quantification of percent CD4+/Ki67+ cells (FIG. 9E), CD8+/Ki67+ cells (FIG. 9F), CD8+/GrnzB+ cells (FIG. 9G), CD11c+/CD8+/MHCII+ cells (FIG. 9H), CD11c+ cells (FIG. 9I), MHCII+ cells (FIG. 9J), and PD-LI+ cells (FIG. 9K) in tumor area are shown.

[0342] The T cell compartment saw an increase in CD4+ and CD8+ expressing cells in the tumor area after treatment in both patients with vulvar melanoma (100-002) and small cell lung cancer (600-002). The patient with liposarcoma (200-003) saw a decrease of CD4+ expressing cells after treatment, while there was no change over baseline for samples from the patient with chondrosarcoma of the bone (100-005).

[0343] The APC compartment was identified by cells expressing CD11c/MHCII or CD11c/PDL-1. The patient with vulvar melanoma (100-002) saw increase in both cell types. The patient with small cell lung cancer (600-002) saw a decrease in CD11c+/MHCII+ cells and an increase in CD11c+/PDL-1+ cells. Neither patient with liposarcoma (200-003) nor chondrosarcoma of the bone (100-005) had cells expressing CD11c/MHCII. The patient with chondrosarcoma of the bone (100-005) saw an increase of CD11c+/PDL-1+ cells, and the patient with liposarcoma (200-003) did not have detectable CD11c+/PDL-1+ cells before or after treatment.

[0344] The patient with vulvar melanoma (100-002) saw in increase in CD4+/Ki67+ cells, CD8+/Ki67+ cells, CD8+/GrnzB+ cells, CD11c+/CD8+/MHCII+ cells, CD11c+ cells, MHCII+ cells, PD-LI+ cells after treatment. The patient with small cell lung cancer (600-002) also saw an increase in all cell types except for MHCII+ cells (decreased) and PD-LI+ cells (no change).

### Example 3: Intratumoral Injection of SYNB1891 and Combination with Atezolizumab: Clinical Trial Results

[0345] SYNB1891 strain design includes the STING agonist, bacterial chassis, and intra-tumoral delivery. The benefit of the STING agonist it is an innate immune activator, which induces interferon responses and drives T cell priming and recruitment. The bacterial chassis drives immune responses relevant to multiple therapeutic targets. Intra-tumoral delivery provides targeted delivery to antigen presenting cell in the tumor microenvironment. SYNB1891 strain schematic is shown in FIG. 10.

[0346] A first-in-human study (NCT04167137; see Example 4 for details) enrolled patients with refractory advanced solid tumors or lymphoma to receive an intratumoral (IT) injection of SYNB1891 either alone or in combination with atezolizumab. Patients enrolled in the monotherapy arms received doses of 1×10⁶-3×10⁸ live cells on Days 1, 8 and 15 of the first 21-day cycle and then on Day 1 of each subsequent cycle. Patients enrolled in the 2 combination cohorts received does of 1×10⁷-3×10⁷ live cells with atezolizumab administered on a 21-day cycle. The primary objective of the study was to evaluate the safety and tolerability of SYNB1891 given alone and in combination of atezolizumab. Other objectives include SYNB1891 kinetics in blood and the injected tumor, STING-target engagement as assessed by IT gene expression and serum cytokines, and tumor responses. This interim analysis includes 24 patients across 6 monotherapy cohorts dosed at 1×10⁶, 3×10⁶, 1×10⁷, or 3×10⁷, 1×10⁸ and 3×10⁸ live cells, and 8 patients dosed in 2 combination therapy cohorts (1×10⁷ and 3×10⁷ live cells). The mean (range) age was 60 (25-82); 20 patients were female. There were 5 cytokine release syndrome events in the monotherapy cohorts, including one which met the criterion for dose limiting toxicity at the 3×10⁸ live cells; there were no other SYNB1891-related serious adverse events. There were no SYNB1891-related infections. SYNB1891 was not detected in the blood at 6 or 24 hours after the first dose or intratumorally 7 days following the first dose. Treatment with SYNB1891 demonstrated activation of the STING pathway and target engagement as assessed by upregulation of interferon-stimulated genes (ISG15, IFIT1, IFIT2), chemokines/cytokines (CXCL9, CXCL10, TNFRS18, TNFSF10) and T-cell response genes (GZMA, CD4, PD-L2) in core biopsies obtained pre-dose and 7 days following the third weekly dose. In addition, there was a dose-response increase in serum cytokines. Durable, stable disease was observed in 3 patients refractory to prior PD-1/L1 antibodies with vulvar melanoma (1×10⁶ live cells), basal cell carcinoma (3×10⁶ live cells) and small cell lung cancer (1×10⁷ live cells). Repeat IT injection of SYNB1891 as monotherapy and in combination atezolizumab in this ongoing study is safe and well-tolerated up to at least 1×10⁸ live cells, and shows evidence of STING pathway target engagement. Specifics of the study are set forth in additional detail below.

[0347] Clinical Phase I design for both multidose tolerability and intra-tumoral injection with and without a combination chemotherapy is shown in FIG. 11. A total of 32 patients received SYNB1891 across 5 sites in the US. 24 patients in Arm 1 (monotherapy) were treated on 6 dose cohorts, 1×10⁶ (n=3), 3×10⁶ (n=3), 1×10⁷ (n=4), 3×10⁷ (n=5), 1×10⁸ (n=3), and 3×10⁸ (n=6) live cells. 8 patients in Arm 2 (combination therapy with standard dose of atezolizumab) were treated on 2 dose cohorts, 1×10⁷ (n=4) and 3×10⁷ (n=4) live cells. 1 patient (Arm 2) remains on treatment and 31 patients discontinued from the study.

[0348] 29 patients (91%) of the 32 patients were Caucasian, and 3 patients (9%) were Black, with more females (20 patients, 63%) than males (12 patients, 38%) and more patients in the <65 years age category (21 patients, 66%) than ≥65 years category (11 patients, 34%). Tumor types include: Basal cell carcinoma (1), colorectal cancer (1), endometrial cancer (1), esophageal cancer (3), liposarcoma (1), melanoma (7), merkel cell carcinoma (1), NSCLC (1), Other (12), sarcoma (1), SCLC (1), squamous cell carcinoma of skin (1), testicular cancer (1).

[0349] 153 doses of SYNB1891 (Arms 1 and 2) and 17 doses of atezolizumab (Arm 2) had been administered. Three subjects had durable, stable disease after treatment with SYNB1891: 100-002 vulvar melanoma (228 days; 1×10⁶ live cells), 600-002 small cell lung cancer (>342 days; 1×10⁷ live cells) and 100-004 basal cell carcinoma (83 days; 3×10⁶ live cells).

[0350] Fourteen patients (44%) experienced TEASs related to SYNB1891. In Arm 2, no adverse events (AEs) were assessed as related to atezolizumab treatment. Four patients (13%) experienced serious adverse events (SAEs) that were considered related to SYNB1891 treatment, all of which were events of cytokine release syndrome (CRS).

[0351] Five patients (16%), all in Arm 1, experienced cytokine release syndrome (CRS) with 2 patients experiencing CRS after the first dose of SYNB1891 and 3 patients after the second dose. One CRS event, occurring at the dose of 3×10⁸ live cells, was assessed as grade 3, was associated with respiratory failure and met the criteria for dose-limiting toxicity (DLT). Three of the 5 patients were successfully able to continue treatment; 1 patient came off study due to CRS and another patient stopped treatment for an unrelated reason.

[0352] Four patients (13%) experienced injection site reactions. These reactions were variably treated with supportive medications and prophylactic medications on subsequent cycles. Injection site reactions did not prohibit further dosing with SYNB1891.

[0353] No systemic infections were considered related to SYNB1891.

[0354] Dose-limiting toxicity (DLT) was observed for 1 patient (grade 3 CRS) at the highest administered dose level in Arm 1 (3×10⁸ live cells). No DLTs were observed in Arm 2. No maximum tolerated dose/recommended phase II dose (MTD/RP2D) was determined for either Arm 1 or Arm 2 prior to the study being terminated. The maximum administered doses of SYNB1891 were deemed safe in both arms.

[0355] Table 8 outlines the biomarker schedule during the study period. Analysis of panel of top cytokine markers from blood draws in preclinical studies (IL-1RA, IFN-γ, IL-1β, IL-2, IL-4, IL-6, IL-8, IL-10, IL-12p70, IL-13, TNF-α) was performed. SYNB1891 kinetics was studied for SYNB1891 quantification in blood draws by qPCR (LLOQ is 25 DNA copies/mL). Tumor fine needle aspirate was studied for SYNB1891 quantification in the tumor (LLOQ is 25 DNA copies/g). Biopsy of eligible lesion were performed by formalin-fixed paraffin-embedded (FFPE) processed for pathology and NanoString tumor immune infiltrate analysis.

TABLE 8
SYNB1891 PK and BioMarker Schedule

| | Cycle 1 | | | | | | | | |
|---|---|---|---|---|---|---|---|---|---|
| | 1 | | | 2 | 3 | | | Cycles | Additional |
| | | | (6 ± 1 | (24 ± 2 | (48 ± 2 | | | 2-4 | Cycles |
| Study Period | Baseline | | hours | hours | hours | 8 ± | 15 ± | 1 ± | 1 ± |
| Study Day | (predose) | Dose | postdose) | postdose) | postdose) | 1 day | 1 day | 1 day | 1 day |
| Serum Cytokines | ● | | ● | ● | | ● | ● | ● (a) | ● (a) |
| Kinetics of Blood | ● | | ● | ● | | | | | |
| SYNB1891 | | | | | | | | | |
| (qPCR assay) | | | | | | | | | |
| Tumor Fine | ● | | | | | ● | | | |
| Needle Aspirate | | | | | | | | | |
| (SYNB PK) | | | | | | | | | |
| Biopsy of | ● | | | | | | | ● (b) | |
| eligible lesion | | | | | | | | | |
| Biopsy of non- | ● | | | | | | | ● (b) | |
| injected lesion (if | | | | | | | | | |
| completed) | | | | | | | | | |

(a) Day 1 (pre-dose and +6 hours) of Cycles 2, 3 and 4 (or additional cycles)
(b) Cycle 2 Day 1 only

[0356] Table 9 outlines NanoString Set.

TABLE 9

| | | | | Max | | |
|---|---|---|---|---|---|---|
| | | | | Change | | |
| | | | Baseline | from | | Treatment duration, |
| Patient | Tumor Type | Dose | (injected) | Baseline | | Weeks/# of doses |
| 100-002 | Vulvar melanoma | 1e6 | 18 mm | 13 | mm | 33 weeks/14 doses (Cycle 12) |
| 200-003 | Liposarcoma | 1e6 | 145 mm | 179 | mm | 3 weeks/4 doses (Cycle 2) |
| 200-004 | Sarcoma (left | 3e6 | 52 mm | 90 | mm | 3 weeks/4 doses (Cycle 2) |
| | chest, breast) | | | | | |
| 600-002 | Right neck mass, | 1e7 | 17 mm | 15 | mm | 45 weeks/18 doses (Cycle 16) |
| | SCLC | | | | | |
| 100-005 | Chondrosarcoma | 1e7 | 95 mm | 104 | mm | 3 weeks/4 doses (Cycle 2) |
| | of the bone | | | | | |
| 100-006 | Cutaneous | 1e7 | 57 mm | 57 | mm | 6 weeks/5 doses (Cycle 3) |
| | squamous cell | | | | | |
| | carcinoma | | | | | |
| 500-001 | Melanoma | 3e7 | 10 mm | Not | | 3 weeks/4 doses (Cycle 2) |
| | | | | done | | |
| 100-010 | Oropharynx | 1e8 | 22 mm | 23 | mm | 24 weeks/11 doses (Cycle 9) |
| | Squamous Cell | | | | | |
| | Carcinoma | | | | | |
| 600-006 | Melanoma | 1e8 | 49 mm | 48.9 | mm | 9 weeks/6 doses (Cycle 4) |
| 500-003 | Melanoma | 3e8 | 22 mm | 34 | mm | 3 weeks/4 doses (Cycle 2) |
| 100-014 | Metastatic | le7 + | 22 mm | 23 | mm | 6 weeks/5 doses (Cycle 3) |
| | adenocarcinoma of | aPD1 | | | | |
| | jejunum | | | | | |
| 600-007 | Esophageal | le7 + | 30 mm | 35.6 | mm | 6 weeks/5 doses (Cycle 3) |

| | |
|---|---|
| cancer | aPD1 |

[0357] FIGS. 12A-12D depict serum cytokines at baseline, 6 hours and 24 hours after injection of 1×10⁶, 3×10⁶, 1×10⁷, 3×10⁷, 1×10⁸, and 3×10⁸ live cells. Cytokines include IL-6 (FIG. 12A), TNFα (FIG. 12B), IFNγ (FIG. 12C), and IL-1RA (FIG. 12D).

[0358] Baseline gene expression levels across different tumor types is depicted in FIG. 13A. Data were normalized to the highest and lowest expressed gene in each row. The majority of injected tumors had low levels of inflammatory gene expression. Fold change in gene expression over baseline in injected tumors (FIG. 13B). Fold changes in gene expression after 1 cycle of SYNB1819 treatment relative to baseline samples as determined by Nanostring. Data were available for the following tumor types (live cell dose): 100-002 Vulvar melanoma (1e6), 200-003 Liposarcoma (1e6), 200-004 Sarcoma (left chest, breast; 3e6), 600-002 SCLC (1e7), 100-005 Chondrosarcoma (1e7), 100-006 Cutaneous squamous cell carcinoma (1e7), 500-001 Melanoma (3e7), 100-010 Oropharynx Squamous Cell Carcinoma (1e8), 600-006 Melanoma (1e8), 500-003 Melanoma (3e8), 100-014 Metastatic adenocarcinoma of jejunum (1e7+aPD1), 600-007 Esophageal cancer (1e7+aPD1). Subjects 100-002 and 600-002 had durable, stable disease.

[0359] Change from baseline in gene expression for the 5 most upregulated genes across 5 different gene categories is shown in FIG. 14. Data are shown for the same 12 patients depicted in FIG. 13A and FIG. 13B. Each symbol depicts the data for a single patient.

[0360] In conclusion, repeat IT injection of SYNB1891 is safe and well-tolerated in a heterogeneous population up to a dose of 3×10⁸ live cells. No infections related to SYNB1819 were seen, and SYNB1819 demonstrated target engagement as assessed by increases in serum cytokines and upregulation of interferon stimulated genes (ISGs). Evidence of durable stable disease was seen in 3 patients, and was associated with upregulation of genes tied to immune activation lymphocytes in 2 of the subjects. Gene expression data was not available for the third subject with durable, stable disease.

### Example 4: Clinical Protocol for Intratumoral Injection of SYNB1891 and Combination with Atezolizumab

[0361] The protocol for the first-in-human clinical trials referenced in the Examples above is provided in Example 4.

### Study Dosing Regimens: Treatments Administered

[0362] Patients enrolled to Arm 1 may receive up to four 21-day cycles of SYNB1891 monotherapy. On Days 1, 8, and 15 of Cycle 1 and Day 1 of Cycles 2 through 4, patients receive an i.t. injection of SYNB1891 into an eligible lesion. If the initial eligible lesion undergoes complete regression and is no longer injectable (at the discretion of the Investigator), a subsequent eligible lesion (until no more eligible lesions remain) may be injected.

[0363] At the end of Cycle 4, patients in Arm 1 who do not have progressive disease (i.e., those who achieve and sustain complete response [CR], partial response [PR], or stable disease [SD]) may receive additional cycles of SYNB1891 administered by i.t. injection on Day 1 of each cycle for up to 24 months (i.e., Cycles 5 to 35) after the initial dose of study treatment until documentation of progressive disease or other discontinuation criteria, satisfaction of a predefined study stopping rule, or no eligible lesions remain.

[0364] Patients enrolled to Arm 2 may receive up to four 21-day cycles with SYNB1891 administered by i.t. injection into an eligible lesion on Days 1, 8, and 15 of Cycle 1 and Day 1 of Cycles 2 through 4. In addition, atezolizumab will be administered in accordance with its recommended dose and schedule (1200 mg IV Q3W) on Day 1 of each of the 4 planned cycles. On days when atezolizumab and SYNB1891 are both administered, SYNB1891 will be administered first, followed by at least 1 hour of observation prior to the atezolizumab infusion. Patients in Arm 2 who do not have progressive disease (i.e., those who achieve and sustain CR, PR, or SD) at the end of Cycle 4 on combination therapy may receive additional cycles of SYNB1891 and atezolizumab for up to 24 months (i.e., Cycles 5 to 35) after the initial dose of study treatment until documentation of progressive disease or other discontinuation criteria, satisfaction of a predefined study stopping rule, or no eligible lesions remain.

### Postdose Monitoring

[0365] The initial patient in each Arm 1 cohort (Sentinel patient) will be monitored for at least 6 hours following the first (Cycle 1 Day 1) i.t. injection of SYNB1891 (or overnight, at the discretion of the Investigator) for evaluation of any procedural complication or acute toxicity (i.e., injection reactions or cytokine release syndrome) and for collection of postdose blood samples. Safety data must be reviewed on or after Day 7 and deemed acceptable by the Investigator and the Sponsor and contract research organization (CRO) Medical Monitors before the Sentinel patient receives any further injections and before any subsequent patients are dosed in that cohort.

[0366] For the remainder of Cycle 1 dosing for the Sentinel patient and for all dosing for non-Sentinel patients, SYNB1891 injections will be administered in the outpatient setting and patients will be closely observed at the clinic for at least 6 hours following each injection for evaluation of any procedural complication or acute toxicity (i.e., injection reactions or cytokine release syndrome) and for collection of postdose blood samples. All patients will be contacted by telephone on Cycle 1 Day 3 to monitor for signs of cytokine release syndrome.

Dose-Finding with the mTPI Algorithm

[0367] In both study arms, each cohort will initially comprise 3 patients (a Sentinel patient and 2 non-Sentinel patients), with subsequent dose escalation governed by an mTPI design (Ji et al 2013).

[0368] The starting dose of SYNB1891 in the first cohort of Arm 1 will be 1×10⁶ live cells and will be increased in approximately 3-fold increments in subsequent cohorts until MTD determination. If no MTD is identified, then the MTD will be considered the maximum dose at which a sufficient number of patients have been treated such that if 14 patients were administered that dose then either escalation or staying at the current dose would be recommended according to Table 1. For example, if 8 patients were administered a dose level with 0 DLTs observed, even if all remaining 6 patients had a DLT, Table 10 would indicate “stay at the current dose”; thus, the remaining 6 patients are not required to evaluate the MTD.

[0369] A mTPI design with a target DLT rate of approximately 30% will be applied for dose escalation and confirmation to determine the MTD/RP2D. In Arm 1, predetermined dose levels of 1×10⁶, 3×10⁶, 1×10⁷, 3×10⁷, 1×10⁸, 3×10⁸, and 1×10⁹ live cells will be explored independently, with additional dose levels as necessary to determine the MTD. A de-escalation dose of 3×10⁵ live cells is available if the starting dose is deemed not tolerable. All dose escalation and de-escalation decisions will be based on the occurrence of DLTs at a given dose during Cycle 1 and will be made jointly by the Investigators and the Sponsor.

[0370] In Table 10, the number of patients treated is indicated in the columns and the number of patients who experienced a DLT is indicated in the rows. Dosing decisions include escalate to the next higher dose (E), stay at the current dose (S), de-escalate to the next lower dose (D), and de-escalate to a lower dose and never test this dose again (i.e., unacceptably toxic dose; DU). During dose escalation, a minimum of 3 patients are required at each dose. Depending on accrual rate and occurrence of DLTs, 3, 4, 5 or 6 patients may be enrolled at each new dose until the last of those patients completes the Cycle 1 DLT assessment period. For example, the dose escalation rules will proceed as follows if 3 patients are enrolled: if 0 of the first 3 patients at a given dose level develops a DLT, then the dose can be escalated to the next level without further expansion. If 1 of the first 3 patients at a given dose level develops a DLT, no more than an additional 3 patients should be enrolled at this dose level until additional DLT data are available since this dose would be considered unacceptably toxic if all 3 of the additional patients experience a DLT (i.e., 4 of 6 patients). If 2 of the first 3 patients at a given dose level develop a DLT, the dose will be de-escalated to the next lower level. If 3 of the first 3 patients at a given dose level develop a DLT, this dose will be considered unacceptably toxic (i.e., the dose will be de-escalated and never re-escalated to that dose again). The same principle will be applied whether 3, 4, 5 or 6 patients are enrolled in the same dose cohort according to Table 10.

[0371] Based on the mTPI design, the number of patients who are enrolled at a dose, but are not yet fully evaluable for DLT assessment, may not exceed the number of remaining patients who are at risk of developing a DLT before the dose would be considered unacceptably toxic (denoted as DU in Table 10). To determine how many more patients can be enrolled at a dose level, one can count steps in a diagonal direction (down and to the right) from the current cell to the first cell marked DU. In total, 3 to 14 patients may be enrolled at a given dose level.

[0372] Dose escalation and confirmation will end after 14 patients have been treated at any of the selected doses. The pool-adjacent-violators-algorithm (Ji et al 2013) will be used to estimate the DLT rates across doses. The dose with an estimated DLT rate closest to 30% may be treated as a preliminary MTD. Using the mTPI algorithm, the totality of the data will be considered before a dose is selected to carry forward to the next cohort, and the escalation schedule may be adjusted based on PK, PD, and safety data emerging throughout the study to determine the MTD/RP2D. Note that while 30% was the target toxicity rate used to generate the guidelines in Table 10, the observed rates of patients with DLTs at the MTD may be slightly above or below 30%.

TABLE 10
Dose-finding Rules per mTPI Design

| Number of participants | Number of Participants Evaluable for DLT at Current Dose | | | | | | | | | | | |
|---|---|---|---|---|---|---|---|---|---|---|---|---|
| with at least 1 DLT | 3 | 4 | 5 | 6 | 7 | 8 | 9 | 10 | 11 | 12 | 13 | 14 |
| 0 | E | E | E | E | E | E | E | E | E | E | E | E |
| 1 | S | S | S | E | E | E | E | E | E | E | E | E |
| 2 | D | S | S | S | S | S | S | S | E | E | E | E |
| 3 | DU | DU | D | S | S | S | S | S | S | S | S | S |
| 4 | | DU | DU | DU | D | D | S | S | S | S | S | S |
| 5 | | | DU | DU | DU | DU | DU | D | S | S | S | S |
| 6 | | | | DU | DU | DU | DU | DU | DU | D | S | S |
| 7 | | | | | DU | DU | DU | DU | DU | DU | DU | D |
| 8 | | | | | | DU | DU | DU | DU | DU | DU | DU |
| 9 | | | | | | | DU | DU | DU | DU | DU | DU |
| 10 | | | | | | | | DU | DU | DU | DU | DU |
| 11 | | | | | | | | | DU | DU | DU | DU |
| 12 | | | | | | | | | | DU | DU | DU |
| 13 | | | | | | | | | | | DU | DU |
| 14 | | | | | | | | | | | | DU |

E = escalate to the next higher dose; S = stay at the current dose; D = de-escalate to the next lower dose; DU = the current dose is unacceptably toxic.
Target toxicity rate = 30%.
Flat noninformative prior Beta (1,1) is used as a prior and ε1 = ε2 = 0.03.

[0373] After all patients in Arm 1 Cohort 4 have completed their Cycle 1 DLT safety evaluation, dosing will begin in Arm 2 starting at the Arm 1 Cohort 3 dose level. Combination doses will not be escalated above the SYNB1891 single-agent MTD established in Arm 1. Once dosing in Arm 2 is initiated, patient allocation to cohorts will be managed by the Sponsor to ensure that a dosing level within Arm 2 is at least one dose level below the SYNB1891 monotherapy dose being evaluated in Arm 1. The atezolizumab dose will remain constant at 1200 mg Q3W for each dose level in Arm 2.

[0374] In both study arms, enrollment will proceed in accordance with the following rules: Review of the safety data for the first patient in a cohort (Sentinel patient) must be completed on or after Day 7 before the remaining 2 patients (non-Sentinel) in that cohort may be dosed (these 2 patients may be dosed concurrently). Observation of DLT(s) in a Sentinel patient will not necessarily preclude enrollment of subsequent patients at the same dose level; rather, DLTs occurring in Sentinel patients will be reviewed individually by the SRC (consisting of the Sponsor Medical Monitor, the CRO Medical Monitor, all active Investigators, and other study personnel as needed) to determine appropriate dosing for subsequent patients.

[0375] After all patients in a cohort have been assessed for DLTs (i.e., after each patient either experiences a DLT or completes the end of Cycle 1 safety assessment, whichever occurs first), the SRC will review all available safety data from the cohort and determine whether to escalate to the next higher SYNB1891 dose, enroll additional patients at the current dose, de-escalate to the next lower dose, or declare that the study objectives or stopping rules have been met. The decision will be informed by the mTPI algorithm recommendation to achieve the targeted toxicity interval.

[0376] Patients must either experience a DLT during Cycle 1 or receive at least 2 of the 3 planned SYNB1891 injections to be considered evaluable for DLT evaluations and contribute to dose-escalation decisions for a given cohort. Patients who withdraw from the study for any reason other than DLTs prior to receiving the second injection of SYNB1891 in Cycle 1 may be replaced.

[0377] Once the RP2D of Arm 2 is determined, up to 20 additional patients may be enrolled in the RP2D cohort to fully characterize the safety profile of SYNB1891 in combination with atezolizumab.

### Definition of Dose-limiting Toxicity

[0378] The occurrence of any of the following toxicities during Cycle 1 will be considered a DLT, if assessed by the Investigator to be possibly, probably, or definitely related to study treatment administration:

1. Grade 4 nonhematologic toxicity (not laboratory); 2. Grade 4 hematologic toxicity lasting ≥7 days, except thrombocytopenia: a. Grade 4 thrombocytopenia of any duration, or b. Grade 3 thrombocytopenia associated with clinically significant bleeding; 3. Any nonhematologic AE Grade ≥3 in severity should be considered a DLT, with the following exceptions: Grade 3 fatigue lasting ≤3 days; Grade 3 diarrhea, nausea, or vomiting without use of antiemetics or antidiarrheals per standard of care; Grade 3 rashwithout use of corticosteroids or anti-inflammatory agents per standard of care; 4. Any Grade 3 or Grade 4 nonhematologic laboratory value if: a. Clinically significant medical intervention is required to treat the patient, or b. The abnormality leads to hospitalization, or c. The abnormality persists for >1 week, or d. The abnormality results in a drug-induced liver injury (DILI). Exceptions: clinically nonsignificant, treatable, or reversible laboratory abnormalities including liver function tests, uric acid, etc.; 5. Febrile neutropenia Grade 3 or Grade 4: Grade 3 is defined as absolute neutrophil count (ANC)<1000/mm³ with a single temperature of >38.3° C. (101° F.) or a sustained temperature of ≥38° C. (100.4° F.) for more than 1 hour, or, Grade 4 is defined as ANC<1000/mm³ with a single temperature of >38.3° C. (101° F.) or a sustained temperature of ≥38° C. (100.4° F.) for more than 1 hour, with life-threatening consequences and urgent intervention indicated; 6. Sepsis, severe abscesses and/or ulcerations requiring surgical management; 7. Prolonged delay (>2 weeks) in initiating Cycle 2 due to treatment-related toxicity; 8. Investigator decision to discontinue study treatment for a treatment-related toxicity during Cycle 1; 9. Missing >33% of study drug doses as a result of Grade 3 drug-related AE(s) during the first cycle; and 10. Grade 5 toxicity.

### Intrapatient Dose Modification

### Dosing Delays and Interruptions

[0379] Study treatment dosing delays will be permitted in any treatment cycle if unforeseen circumstances prevent the patient from returning to the clinic on the scheduled day(s). A maximum delay of 2 days in Cycle 1 will be permitted. If administration of study treatment is delayed by >2 days in Cycle 1, that dose is considered missed and the patient should receive the next dose at the next visit.

[0380] If a patient misses ≥2 SYNB1891 doses in Cycle 1, then the patient will be discontinued permanently from treatment and may be replaced. In Cycle 2 and beyond, if a patient misses the dose of SYNB1891, then the patient may be discontinued permanently from treatment, unless the Investigator's assessment of the benefit/risk suggests otherwise (after consultation with Sponsor). If treatment is permanently discontinued, patients will continue to be followed for safety as indicated for end of treatment and follow-up.

[0381] SYNB1891 treatment interruption can occur due to treatment-related toxicity, including Grade 3 or higher infections or local inflammation requiring antibiotics, and the start of a new cycle may not occur until the following criteria have been met:
[0382] 1. Nonhematologic toxicities have returned to either baseline or Grade ≤1, or at the Investigator's discretion, Grade ≤2 if not considered a safety risk. This condition must be met within 14 days of the initial treatment interruption;
[0383] 2. Hematologic toxicities: ANC≥1000/mm³ or have returned to baseline levels; platelet count ≥50,000/mm³ or has returned to baseline levels. This condition must be met within 14 days of the initial treatment interruption;
[0384] 3. If a patient requires treatment with a systemic antibiotic on study, SYNB1891 should be held for the duration of the antibiotic regimen and for 5 half-lives after the last dose of antibiotics. Once the patient is a pyretic after completion of the antibiotic washout period, SYNB1891 may resume.

[0385] If the patient cannot meet the above conditions within the specified time frame, then study treatment should be permanently discontinued, unless the Investigator's assessment of the benefit/risk suggests otherwise (after consultation with Sponsor).

[0386] Atezolizumab treatment may be temporarily suspended in patients experiencing toxicity considered to be related to study treatment. If corticosteroids are initiated for treatment of immune-mediated toxicity, they must be tapered over ≥1 month to the equivalent of ≤10 mg/day oral prednisone before atezolizumab can be resumed. If atezolizumab is withheld for >12 weeks after event onset, the patient will be discontinued from atezolizumab. However, atezolizumab may be withheld for >12 weeks to allow for patients to taper off corticosteroids prior to resuming treatment. Atezolizumab can be resumed after being withheld for >12 weeks if the Medical Monitor(s) agrees that the patient is likely to derive clinical benefit. Atezolizumab treatment may be suspended for reasons other than toxicity (e.g., surgical procedures) with Medical Monitor approval. The Investigator and the Medical Monitor(s) will determine the acceptable length of treatment interruption.

### Dose Reductions for SYNB1891

[0387] No dose reductions of SYNB1891 will be permitted in Cycle 1; any patient who requires such a modification will be permanently discontinued and may be replaced. After Cycle 1, SYNB1891 dose reductions are permitted in approximately 3-fold decrements after consultation with the Sponsor. While no specific dose reductions are required for Grade 1 or 2 treatment-related toxicities, the Investigator should always manage patients according to medical judgment and assessment of risk/benefit for that patient. Patients experiencing recurrent or intolerable Grade 2 toxicity may resume dosing at the next lower dose level once the toxicity has resolved or recovery to Grade 1 or baseline has occurred.

[0388] If more than 1 dose reduction is required, then the patient(s) are permanently discontinued from treatment but will be followed for end of treatment and follow-up assessments.

[0389] Once a dose has been reduced, the patient should continue to receive that dose for all subsequent doses. In this setting, intrapatient dose escalation is not permitted.

### Dose Reductions for Atezolizumab

[0390] No dose reductions of atezolizumab will be permitted in this study.

Adverse Events Associated with SYNB1891

[0391] Guidelines for the management of patients who experience AEs considered to be potentially associated with SYNB1891 are provided in Table 11.

TABLE 11
Toxicity Management for Adverse Events Considered Potentially Associated with SYNB1891

| | | Recommended Medical | Premedication and |
|---|---|---|---|
| Event | NCI CTCAE Grade | Management | Subsequent Dosing |
| Cytokine release | Grade 1 | Increase vital sign and | Administer as planned |
| syndrome (may | Fever with or without | oxygensaturation | |
| include associated AEs, | constitutional | monitoring as medically | |
| e.g., fever, tachypnea, | symptoms | indicated until the patient is | |
| headache, tachycardia, | | deemed medically stable in | |
| hypotension, rash, | | the opinion of the | |
| hypoxia) | | Investigator. | |
| | Grade 2 Hypotension | Increase vital sign and | Patient may be |
| | responding to fluids; | oxygensaturation | premedicated 1.5 hours |
| | hypoxia responding to <40% | monitoring as medically | (±30 minutes) prior to |
| | oxygen | indicated until the patient is | study treatment |
| | | deemed medically stable in | administration with |
| | | the opinion of the | oralacetaminophen |
| | | Investigator. | (500 to 1000 mg) or |
| | | Additional appropriate | equivalent dose of |
| | | therapy may include, but is | antipyretics. |
| | | not limited to: | |
| | | IV fluids | |
| | | NSAIDs | |
| | | Acetaminophen | |
| | | Narcotics | |
| | | Oxygen | |
| | | Evaluate for infectious | |
| | | etiologies and treat | |
| | | neutropenia if present. | |
| | Grade 3 | Appropriate therapy may | Discuss with the |
| | Hypotension managed | include, but is not limited | Sponsorprior to the |
| | with one pressor; | to: | resumption ofstudy |
| | hypoxia requiring ≥40% | IV fluids NSAIDs | treatment. Upon |
| | oxygen | Acetaminophen Narcotics | approval by the |
| | | Oxygen Pressors | Sponsor, resume |
| | | Corticosteroids Anti-IL6 | SYNB1891 at a |
| | | (e.g., tocilizumab) | reduced dose upon AE |
| | | Empiric antibiotics Monitor | resolution to baseline |
| | | patients closely; consider | or Grade 1. |
| | | an intensive caresetting | Patient may be |
| | | | premedicated 1.5 hours |
| | | | (±30 minutes) prior to |
| | | | study treatment |
| | | | administration with |
| | | | oralacetaminophen |
| | | | (500 to 1000 mg) or |
| | | | equivalent |
| | | | dose of antipyretics. |
| | Grade 4 | Appropriate therapy may | Permanently |
| | Life-threatening | include, but is not limited | discontinuestudy |
| | consequences; urgent | to: | treatment. |
| | intervention indicated | IV fluids NSAIDs | |
| | | Acetaminophen Narcotics | |
| | | Oxygen Pressors | |
| | | Corticosteroids Anti-IL6 | |
| | | (e.g., tocilizumab) | |
| | | Empiric antibiotics Monitor | |
| | | patients closely; consider | |
| | | an intensive care | |
| | | setting. | |
| Systemic infection | Grade 3 or higher | Appropriate therapy may | Patients who require |
| | | include, but is not limited | systemic antibiotic |
| | | to: | treatment should |
| | | IV fluids NSAIDs | postpone dosing with |
| | | Acetaminophen Narcotics | SYNB1891 for the |
| | | Oxygen Pressors | duration of the |
| | | Empiric antibiotics | antibioticregimen and |
| | | Perform local blood and | for |
| | | urinecultures and | 5 half-lives after the |
| | | sensitivities. | lastdose of antibiotics |
| | | Perform serum qPCR | and until the patient is |
| | | specificfor EcN. | apyretic. |
| Local injection site | Grade 3 or higher | Consider surgical | Permanently |
| reactions (may include | | interventionas needed in | discontinue study |
| associated AEs, e.g., | | addition to and in | treatment. |
| abscess, infection, | | accordance with local | |
| ulceration or necrosis, | | standard of care, which | |
| orsevere tissue | | may include, but is not | |
| damage) | | limited to: | |
| | | NSAIDs | |
| | | Acetaminophen Antibiotics | |

Abbreviations: AE = adverse event; CTCAE = Common Terminology Criteria for Adverse Events; EcN = E. coliNissle; IL = interleukin; IV = intravenous; NCI = National Cancer Institute; NSAID = nonsteroidal anti- inflammatory drug; qPCR = quantitative polymerase chain reaction.

### Duration of Study Participation

[0392] The maximum time of study participation for a patient is up to 26 months, including the screening period (up to 28 days), treatment administration period (up to 24 months), and safety follow-up period (30±5 days after the last dose).

### Patient Population

### Number of Patients

[0393] Approximately 70 patients are anticipated for enrollment, which provides for 4 to 7 dose-finding cohorts in Arm 1, 1 to 5 cohorts in Arm 2, and replacement of 1 patient per cohort, as well up to 20 additional patients enrolled at the RP2D) in Arm 2. Additional cohorts may be required in either arm to determine the MTD/RP2D.

### Eligibility Criteria

[0394] This study will comprise patients with advanced/metastatic solid tumors or lymphoma. Patients will be eligible for enrollment regardless of gender or race/ethnicity.

### Inclusion Criteria

[0395] Patients must meet all of the following inclusion criteria to be eligible: (1) Able and willing to voluntarily complete the informed consent process (patient or patient's representative), (2) Adults aged ≥18 years (on the day of signing informed consent) with histologically- or cytologically-confirmed stage III or IV advanced/metastatic solid tumor or lymphoma for which no therapeutic options are available to extend survival or for which the patient is not a candidate for standard-of-care therapy, (3) Eastern Cooperative Oncology Group performance status ≤1, (4) Life expectancy ≥3 months, (5) ≥1 injectable, measurable (≥10 mm in diameter, or ≥15 mm for nodal lesions), eligible lesion as defined by RECIST 1.1 (Eisenhauer et al 2009), iRECIST (Seymour et al 2017), and/or LYRIC (Cheson et al 2016) and as assessed by the Investigator. Eligible lesions must not be located in the thoracic cavity, spleen, pancreas, gastrointestinal tract (liver injection allowed), or cranium and must be amenable to percutaneous injection and away from major blood vessels or neurological structures, (6) Able to provide biopsies for biomarker analysis from injected and (if available)noninjected lesions at baseline and other time points during the study, (7) Oxygen saturation >90% without the use of supplemental oxygen, (9) Adequate cardiac function, defined as follows: (a) Left ventricular ejection fraction (LVEF) >50% by multi-gated acquisition (MUGA)scan or echocardiogram (ECHO) performed within 6 months prior to the first dose of study treatment provided the patient has not received any potential cardiotoxic agents in the intervening period. Symptoms relating to left ventricular dysfunction, cardiac arrhythmia, or cardiac ischemia must all be Grade <1 per NCI CTCAE version 5.0, and (b) QTc interval corrected for heart rate using Fridericia's formula (QTcF)<480 msec at screening.

[0396] Other inclusion criteria include:
[0397] 1. Laboratory values within the following ranges:
   [0398] a. Absolute neutrophil count ≥1500/μL
   [0399] b. Lymphocyte count ≥500/μL
   [0400] c. Platelets ≥100,000/μL without transfusion
   [0401] d. Hemoglobin ≥9.0 g/dL (patients may be transfused to meet this criterion)
   [0402] e. Estimated glomerular filtration rate (eGFR) >50 mL/min/1.73 m² per the Cockcroft-Gault formula
   [0403] f. Total bilirubin ≤1.5×the upper limit of normal (ULN) OR direct bilirubin ≤ULN for participants with total bilirubin levels >1.5×ULN or ≤3×ULN for patients with Gilbert's syndrome
   [0404] g. AST, ALT, and alkaline phosphatase ≤2.5×ULN (AST and ALT≤5×ULN for participants with liver metastases and alkaline phosphatase ≤5×ULN for participants with liver or bone metastases)
   [0405] h. International normalized ratio (INR) or PT or aPTT≤1.5×ULN unless participant is receiving anticoagulant therapy as long as PT or aPTT is within therapeutic range of intended use of anticoagulants
[0406] 2. Agree to use an acceptable method of contraception after informed consent, throughout the study, and for 5 months after the last dose of SYNB1891 or atezolizumab.

[0407] Additional inclusion criteria that apply only to Arm 2 study participants are as follows:
[0408] 3. TSH must be within the normal reference range or the patient must be receiving stable thyroid replacement therapy.
[0409] 4. Patients must have received treatment with an anti-PD-1/L1 monoclonal antibody (mAb) administered either as monotherapy, or in combination with other CPIs or other therapies, if indicated (if CPI therapy is not indicated as a part of standard-of-care therapy, patients may be CPI naïve).

[0410] Additional inclusion criteria that apply only to the Arm 2 expansion study participants are as follows:
[0411] 5. Patients must have progressed on treatment with an anti-PD-1/L1 mAb administered either as monotherapy, or in combination with other CPIs or other therapies, if indicated (if CPI therapy is not indicated as a part of standard-of-care therapy, patients may be CPInaïve).

[0412] PD-1/L1 treatment progression is defined by meeting all of the following criteria:
[0413] a. Has received at least 2 doses of an approved anti-PD-1/L1 mAb.

[0414] Has demonstrated disease progression after PD-1/L1 as defined by RECIST 1.1, iRECIST, and/or LYRIC. The initial evidence of disease progression is to be confirmed by a second assessment no less than 4 weeks from the date of the first documented disease progression, in the absence of rapid clinical progression as determined by the Investigator. Once disease progression is confirmed, the initial date of disease progression documentation will be considered the date of disease progression.
[0415] b. Progressive disease has been documented within 12 weeks from the last dose of anti-PD-1/L1 mAb.

### Exclusion Criteria

[0416] Patients meeting any of the following criteria are not eligible for study enrollment:
[0417] 1. Chemotherapy, radiation, or biological cancer therapy within 14 days prior to the first dose of study treatment, or failure of any AEs to recover to Baseline or NCI CTCAE version 5.0 Grade 1, except for any grade of alopecia caused by cancer therapeutics administered >28 days earlier or Grade 2 endocrinopathy from prior checkpoint inhibitor therapy on a stable dose of replacement therapy (e.g., hypothyroidism, adrenal insufficiency).
[0418] 2. Systemic immunostimulatory agents (including, but not limited to, IFN and IL-2) within 28 days or 5 drug elimination half-lives (whichever is longer) prior to initiation of study treatment. Checkpoint inhibitors are not considered systemic immunostimulatory agents for this criterion and are subject to the washout period listed in exclusion criterion #1.
[0419] 3. Allogeneic hematopoietic stem cell transplantation that requires current use of immunosuppressors.
[0420] 4. Receipt of a live vaccine within 90 days prior to the first dose of study treatment or anticipation of a need for such a vaccine during treatment.
[0421] 5. Receipt of antibiotics within 7 days prior to the first dose of study treatment.
[0422] 6. Participation in a study of an investigational agent and receipt of study therapy or use of an investigational device within 28 days prior to the first dose of study treatment.
[0423] 7. Diagnosed immunodeficiency or current use of chronic systemic steroid therapy in excess of replacement doses (prednisone ≤10 mg/day or equivalent is acceptable) or any other form of immunosuppressive medication within 7 days prior to the first dose of study treatment.
[0424] 8. For injection and biopsy of visceral (deep) lesions: patients must not be on long-acting antiplatelet agents such as aspirin or clopidogrel or on therapeutic doses of anticoagulants, with the exception of patients receiving a preventative dose of low molecular weight heparin. In patients receiving preventative low molecular weight heparin, treatment must be stopped 24 hours before the intratumoral injection and resumed again 24 hours after the injection (Marabelle et al 2018).
[0425] 9. Previous or concurrent malignancy, with the exception of:
   [0426] a. Adequately treated basal or squamous cell carcinoma, in situ carcinoma of the cervix, or ductal carcinoma in situ of the breast;
   [0427] b. Localized prostate cancer definitively treated with surgery or radiation or stable on hormone therapy;
   [0428] c. Other cancer from which the patient has been disease free for at least 2 years.
[0429] 10. Clinically active central nervous system (CNS) metastases and/or carcinomatous meningitis (treated brain metastases are permitted if radiologically stable for ≥28 days prior to the first dose of study treatment).
[0430] 11. Allergy to antibiotics that precludes treatment for infection with E. coli Nissle 1917.
[0431] 12. Hepatitis B or C infection(s) unless screening tests indicate a negative viral load, and/or human immunodeficiency virus (HIV) infection unless screening tests indicate a negative or below the limit of quantitation viral load.
[0432] 13. Known active tuberculosis.
[0433] 14. Grade 3 or higher infection according to NCI CTCAE within 28 days prior to initiation of study treatment, including, but not limited to, hospitalization for complications of infection, bacteremia, or severe pneumonia.
[0434] 15. Failure to fully recover from the effects of major surgery. Surgeries that required general anesthesia must be completed >14 days before the first dose of study drug. Surgery requiring regional/epidural anesthesia must be completed >72 hours before the first dose of study treatment and participants should be recovered.
[0435] 16. Heart failure of New York Heart Association Class 3 or greater, restrictive cardiomyopathy, or unstable angina or recent myocardial infarction within 3 months prior to the first dose of study treatment.
[0436] 17. Any other medical condition that might confound the results of the study, interfere with the participant's participation, or is not in the best interest of the participant, in the opinion of the treating Investigator.
[0437] 18. Pregnant or breastfeeding or anticipated conception or fathering of children within the projected duration of the study and for 5 months after the last dose of SYNB1891 or atezolizumab.

[0438] Additional exclusion criteria that apply only to Arm 2 study participants are as follows:
[0439] 19. History of immune-mediated AEs on prior PD-1/PD-L1 therapies requiring discontinuation or immunosuppressor therapy, excluding endocrinopathies.
[0440] 20. Active or history of underlying autoimmune disease or immune deficiency, including, but not limited to, myasthenia gravis, myositis, autoimmune hepatitis, systemic lupus erythematosus, rheumatoid arthritis, inflammatory bowel disease, antiphospholipid antibody syndrome, Wegener granulomatosis, Sjögren syndrome, Guillain-Barré syndrome, or multiple sclerosis, with the following exceptions:
   [0441] a. Patients with a history of autoimmune-related hypothyroidism who are on thyroid replacement hormone are eligible for the study.
   [0442] b. Patients with controlled Type 1 diabetes mellitus who are on an insulin regimen are eligible for the study.
   [0443] c. Patients with eczema, psoriasis, lichen simplex chronicus, or vitiligo with dermatologic manifestations only (e.g., patients with psoriatic arthritis are excluded) are eligible for the study provided all of following conditions are met:
      [0444] 1. Rash must cover ≤10% of body surface area;
      [0445] 2. Disease is well controlled at baseline and requires only low-potency topical corticosteroids;
      [0446] 3. No occurrence of acute exacerbations of the underlying condition requiring psoralen plus ultraviolet A radiation, methotrexate, retinoids, biologic agents, oral calcineurin inhibitors, or high potency or oral corticosteroids within the previous 12 months.
[0447] 21. History of a Grade ≥3 allergic anaphylactic reaction following treatment with a PD-1 mAb or to chimeric, human, or humanized antibodies or fusion proteins.
[0448] 22. History of idiopathic pulmonary fibrosis, organizing pneumonia (e.g., bronchiolitis obliterans), drug-induced pneumonitis requiring treatment, or idiopathic pneumonitis, orevidence of active pneumonitis.
[0449] 23. Known hypersensitivity to Chinese hamster ovary cell products or any component of the atezolizumab formulation.

1. A method of treating a human subject with cancer, the method comprising:
administering to the human subject a recombinant microorganism capable of expressing a stimulator of interferon gene (STING) agonist,
wherein a level of one or more interferon-stimulated genes, one or more T cell function genes, one or more chemokine genes, one or more cytokine genes, and/or one or more serum cytokines are upregulated in the human subject after administration, as compared to a control level of the one or more interferon-stimulated genes, one or more T cell function genes, one or more chemokine genes, one or more cytokine genes, and/or one or more serum cytokines.

2. The method of claim 1, wherein the one or more interferon-stimulated genes are selected from the group consisting of ISG15, IFIT1, and IFIT2.

3. The method of claim 1 or claim 2, wherein the one or more T cell function genes are selected from the group consisting of GZMA, CD4, CD8, and PD-L2.

4. The method of any one of claims 1-3, wherein the one or more chemokines and/or cytokine genes are selected from the group consisting of CXCL9, CXCL10, TNFRS1B, and TNFSF10.

5. The method of any one of claims 1-4, wherein the level of the one or more interferon-stimulated genes, one or more T cell function genes, one or more chemokine genes, and/or one or more cytokine genes in the subject after administration is upregulated by about 2-fold, about 3-fold, or about 4-fold, as compared to the control level.

6. The method of any one of claims 1-5, wherein the one or more serum cytokines are selected from the group consisting of IL-6, TNFα, IFNγ, and IL-1Ra.

7. The method of claim 6, wherein the level of the one or more serum cytokines is about 2-fold, about 5-fold, about 10-fold, or about 20-fold higher than the control level of the one or more serum cytokines.

8. The method of any one of the previous claims, wherein the control level is (i) a level of the one or more interferon-stimulated genes, one or more T cell function genes, one or more chemokine genes, one or more cytokine genes, and/or one or more serum cytokines in the human subject prior to administration, or (ii) a level of the one or more interferon-stimulated genes, one or more T cell function genes, one or more chemokine genes, one or more cytokine genes, and/or one or more serum cytokines in a control human subject or population of control human subjects who has not been administered the recombinant microorganism.

9. The method of any one of the previous claims, wherein the recombinant microorganism is administered to the subject at a dose of about 1×10⁶, about 3×10⁶, about 1×10⁷, about 3×10⁷, about 1×10⁸, about 3×10⁸, or about 1×10⁹ live cells.

10. The method of any one of claims 1-8, wherein the recombinant microorganism is administered to the subject at a dose of about 1×10⁶ to about 3×10⁶, from about 3×10⁶ to about 1×10⁷, from about 1×10⁷ to about 3×10⁷, from about 3×10⁷ to about 1×10⁸, from about 1×10⁸ to about 3×10⁸, and from about 3×10⁸ to about 1×10⁹ live cells.

11. The method of any one of the previous claims, wherein the recombinant microorganism is administered to the subject once weekly, once every two weeks, or once every three weeks.

12. The method of claim 11, wherein the recombinant microorganism is administered to the subject once weekly.

13. The method of claim 11, wherein the recombinant microorganism is administered to the subject once every three weeks.

14. The method of any one of the previous claims, wherein the recombinant microorganism is administered for at least 3 weeks, at least 6 weeks, at least 2 months, at least 4 months, at least 6 months, at least 8 months, at least 10 months, at least 12 months, at least 14 months, at least 16 months, at least 18 months, at least 20 months, at least 22 months, or at least 24 months.

15. The method of claim 14, wherein the recombinant microorganism is administered for at least 24 months.

16. The method of any one of the previous claims, wherein the cancer is a solid tumor, a lymphoma, melanoma, liposarcoma, sarcoma, small cell lung cancer, squamous cell carcinoma, or chondrosarcoma.

17. The method of any one of the previous claims, wherein the STING agonist is c-diAMP, c-GAMP, or c-diGMP.

18. The method of claim 17, wherein the STING agonist is c-diAMP.

19. The method of any one of the previous claims, wherein the recombinant microorganism expresses at least one non-native gene sequence encoding an enzyme capable of producing the STING agonist.

20. The method of claim 19, wherein the at least one non-native gene sequence is dacA or cGAS.

21. The method of claim 19 or claim 20, wherein the at least one non-native gene sequence is integrated into a chromosome of the microorganism.

22. The method of claim 19 or claim 20, wherein the at least one non-native gene sequence is present on a plasmid in the microorganism.

23. The method of claim 21 or claim 22, wherein the at least one non-native gene sequence encoding the enzyme capable of producing the STING agonist is operably linked to a constitutive promoter.

24. The method of claim 21 or claim 22, wherein the at least one non-native gene sequence encoding the enzyme capable of producing the STING agonist is operably linked to an inducible promoter.

25. The method of claim 24, wherein inducible promoter is induced by low-oxygen or anaerobic conditions, by the hypoxic environment of a tumor, or temperature.

26. The method of any one of the preceding claims, wherein the recombinant microorganism further comprises one or more auxotrophies and/or one or more endogenous phage deletions.

27. The method of claim 26, wherein the recombinant microorganism is an auxotroph in dapA, thyA, or both dapA and thyA.

28. The method of any one of the preceding claims, wherein the recombinant microorganism is non-pathogenic to the subject.

29. The method of any one of the preceding claims, wherein the recombinant microorganism is Escherichia coli Nissle.

30. The method of any one of the previous claims, further comprising selecting a subject who would benefit from an increase in the level of the one or more interferon-stimulated genes, one or more T cell function genes, one or more chemokine genes, one or more cytokine genes, and/or one or more serum cytokines.

31. The method of any one of the previous claims, further comprising isolating a sample from the subject after administration and measuring the level of the one or more interferon-stimulated genes, one or more T cell function genes, one or more chemokine genes, one or more cytokine genes, and/or one or more serum cytokines.

32. The method of any one of the previous claims, further comprising isolating a sample from the subject prior to administration and measuring the level of the one or more interferon-stimulated genes, one or more T cell function genes, one or more chemokine genes, one or more cytokine genes, and/or one or more serum cytokines.

33. The method of claim 31 or claim 32, wherein the sample is a tumor biopsy and/or a serum sample.

34. The method of any one of the previous claims, wherein the administering is intratumoral injection.

35. A method of increasing the number of T cells present in a tumor or a cancer in a human subject, the method comprising administering to the human subject a recombinant microorganism capable of expressing a stimulator of interferon gene (STING) agonist, wherein the number of T cells present in the tumor or cancer is increased by at least about 25%, about 50%, about 75%, about 100%, about 1.5-fold, about 2-fold, about 2.5-fold or about 3-fold after administration of the recombinant microorganism as compared to a number of T cells present in the tumor or cancer prior to administration of the recombinant microorganism.

36. The method of claim 35, wherein the T cells present in the tumor after administration are CD4+, CD8+, CD11c+/MHCII+, CD11c+/PD-L1+, CD4+/Ki67+, CD8+/Ki67+, CD8+/GrnzB+, CD11c+/CD8+/MHCII+, CD11c+, MHCII+, PD-LI+, or a combination thereof.

37. A method of treating a human subject having a tumor or a cancer, the method comprising: selecting a human subject that would benefit from an increase in the number of T cells present in the tumor, and
administering to the human subject a recombinant microorganism capable of expressing a stimulator of interferon gene (STING) agonist,
wherein the number of T cells present in the tumor is increased by at least about 25%, about 50%, about 75%, about 100%, about 1.5-fold, about 2-fold, about 2.5-fold or about 3-fold after administration of the recombinant microorganism as compared to a number of T cells present in the tumor prior to administration of the recombinant microorganism.

38. The method of claim 37, wherein the T cells present in the tumor after administration are CD4+, CD8+, CD11c+/MHCII+, CD11c+/PD-L1+, CD4+/Ki67+, CD8+/Ki67+, CD8+/GrnzB+, CD11c+/CD8+/MHCII+, CD11c+, MHCII+, PD-LI+, or a combination thereof.

39. The method of any one of claims 35-38, wherein the tumor or cancer is stable or regressing after administration.

40. A method of increasing survival of a human subject suffering from cancer or having a tumor, the method comprising administering to the human subject a recombinant microorganism capable of expressing a stimulator of interferon gene (STING) agonist, wherein the number of T cells present in the tumor or cancer is increased by at least about 25%, about 50%, about 75%, about 100%, about 1.5-fold, about 2-fold, about 2.5-fold or about 3-fold after administration of the recombinant microorganism as compared to a number of T cells present in the tumor or cancer prior to administration of the recombinant microorganism, wherein the cancer and/or tumor is stable or regressing after administration.

41. The method of claim 40, wherein the T cells present in the tumor after administration are CD4+, CD8+, CD11c+/MHCII+, CD11c+/PD-L1+, CD4+/Ki67+, CD8+/Ki67+, CD8+/GrnzB+, CD11c+/CD8+/MHCII+, CD11c+, MHCII+, PD-LI+, or a combination thereof.

42. The method of any one of claims 35-41, wherein the recombinant microorganism is administered to the subject at a dose of about 1×10⁶, about 3×10⁶, about 1×10⁷, about 3×10⁷, about 1×10⁸, about 3×10⁸, or about 1×10⁹ live cells.

43. The method of any one of claims 35-41, wherein the recombinant microorganism is administered to the subject at a dose of about 1×10⁶ to about 3×10⁶, from about 3×10⁶ to about 1×10⁷, from about 1×10⁷ to about 3×10⁷, from about 3×10⁷ to about 1×10⁸, from about 1×10⁸ to about 3×10⁸, and from about 3×10⁸ to about 1×10⁹ live cells.

44. The method of any one of claims 35-43, wherein the recombinant microorganism is administered to the subject once weekly, once every two weeks, or once every three weeks.

45. The method of claim 44, wherein the recombinant microorganism is administered to the subject once weekly.

46. The method of claim 44, wherein the recombinant microorganism is administered to the subject once every three weeks.

47. The method of any one of claims 35-46, wherein the recombinant microorganism is administered for at least 3 weeks, at least 6 weeks, at least 2 months, at least 4 months, at least 6 months, at least 8 months, at least 10 months, at least 12 months, at least 14 months, at least 16 months, at least 18 months, at least 20 months, at least 22 months, or at least 24 months.

48. The method of claim 47, wherein the recombinant microorganism is administered for at least 24 months.

49. The method of any one of claims 35-47, wherein the STING agonist is c-diAMP, c-GAMP, or c-diGMP.

50. The method of any one of claims 35-49, wherein the recombinant microorganism expresses at least one non-native gene sequence encoding an enzyme capable of producing the STING agonist.

51. The method of claim 50, wherein the at least one non-native gene sequence is dacA or cGAS.

52. The method of any one of claims 35-51, wherein the cancer or tumor is a solid tumor, a lymphoma, melanoma, liposarcoma, sarcoma, small cell lung cancer, squamous cell carcinoma, or chondrosarcoma.

53. The method of any one of the previous claims, wherein the tumor responds to treatment resulting in a decrease of at least 5%, at least 10%, at least 20%, at least 25%, or at least 30% of a Response Evaluation Criteria in Solid Tumours (RECIST) when compared to the RECIST prior to treatment.

54. The method of any one of the previous claims, further comprising administering an additional therapeutic agent, optionally wherein the additional therapeutic agent is an anti-PD1 antibody or an anti-PDL1 antibody.

55. The method of claim 54, wherein the anti-PDL1 antibody is atezolizumab.

56. The method of any one of the previous claims, wherein the microorganism is SYNB1891.

57. The method of claim 54, wherein SYNB1891 comprises the genotype ΔthyA-ΔdapA-ΔΦ-P_{furS}-dacA.

The application's sequence listing, which the Patent Office published only in electronic form, follows.

SEQUENCE LISTING (1447 sequences)

SEQ ID NO: 1 - protein, 447 aa, Artificial Sequence
  source: /note="Description of Artificial Sequence: Synthetic polypeptide"
  source: /note="Heavy chain humanized"
QVQLVQSGVEVKKPGASVKVSCKASGYTFTNYYMYWVRQAPGQGLEWMGGINPSNGGTNFNEKFKNRVTLTTDSSTTTAYMELKSLQFDDTAVYYCARRDYRFDMGFDYWGQGTTVTVSSASTKGPSVFPLAPCSRSTSESTAALGCLVKDYFPEPVTVSWNSGALTSGVHTFPAVLQSSGLYSLSSVVTVPSSSLGTKTYTCNVDHKPSNTKVDKRVESKYGPPCPPCPAPEFLGGPSVFLFPPKPKDTLMISRTPEVTCVVVDVSQEDPEVQFNWYVDGVEVHNAKTKPREEQFNSTYRVVSVLTVLHQDWLNGKEYKCKVSNKGLPSSIEKTISKAKGQPREPQVYTLPPSQEEMTKNQVSLTCLVKGFYPSDIAVEWESNGQPENNYKTTPPVLDSDGSFFLYSRLTVDKSRWQEGNVFSCSVMHEALHNHYTQKSLSLSLGK

SEQ ID NO: 2 - protein, 218 aa, Artificial Sequence
  source: /note="Description of Artificial Sequence: Synthetic polypeptide"
  source: /note="Light chain humanized"
EIVLTQSPATLSLSPGERATLSCRASKGVSTSGYSYLHWYQQKPGQAPRLLIYLASYLESGVPARFSGSGSGTDFTLTISSLEPEDFAVYYCQHSRDLPLTFGGGTKVEIKRTVAAPSVFIFPPSDEQLKSGTASVVCLLNNFYPREAKVQWKVDNALQSGNSQESVTEQDSKDSTYSLSSTLTLSKADYEKHKVYACEVTHQGLSSPVTKSFNRGEC

SEQ ID NO: 3 - protein, 440 aa, Artificial Sequence
  source: /note="Description of Artificial Sequence: Synthetic polypeptide"
  source: /note="Heavy chain human monoclonal"
QVQLVESGGGVVQPGRSLRLDCKASGITFSNSGMHWVRQAPGKGLEWVAVIWYDGSKRYYADSVKGRFTISRDNSKNTLFLQMNSLRAEDTAVYYCATNDDYWGQGTLVTVSSASTKGPSVFPLAPCSRSTSESTAALGCLVKDYFPEPVTVSWNSGALTSGVHTFPAVLQSSGLYSLSSVVTVPSSSLGTKTYTCNVDHKPSNTKVDKRVESKYGPPCPPCPAPEFLGGPSVFLFPPKPKDTLMISRTPEVTCVVVDVSQEDPEVQFNWYVDGVEVHNAKTKPREEQFNSTYRVVSVLTVLHQDWLNGKEYKCKVSNKGLPSSIEKTISKAKGQPREPQVYTLPPSQEEMTKNQVSLTCLVKGFYPSDIAVEWESNGQPENNYKTTPPVLDSDGSFFLYSRLTVDKSRWQEGNVFSCSVMHEALHNHYTQKSLSLSLGK

SEQ ID NO: 4 - protein, 214 aa, Artificial Sequence
  source: /note="Description of Artificial Sequence: Synthetic polypeptide"
  source: /note="Light chain human monoclonal"
EIVLTQSPATLSLSPGERATLSCRASQSVSSYLAWYQQKPGQAPRLLIYDASNRATGIPARFSGSGSGTDFTLTISSLEPEDFAVYYCQQSSNWPRTFGQGTKVEIKRTVAAPSVFIFPPSDEQLKSGTASVVCLLNNFYPREAKVQWKVDNALQSGNSQESVTEQDSKDSTYSLSSTLTLSKADYEKHKVYACEVTHQGLSSPVTKSFNRGEC

SEQ ID NO: 5 - protein, 448 aa, Artificial Sequence
  source: /note="Description of Artificial Sequence: Synthetic polypeptide"
  source: /note="Ipilimumab, CTLA-4, Heavy chain"
QVQLVESGGGVVQPGRSLRLSCAASGFTFSSYTMHWVRQAPGKGLEWVTFISYDGNNKYYADSVKGRFTISRDNSKNTLYLQMNSLRAEDTAIYYCARTGWLGPFDYWGQGTLVTVSSASTKGPSVFPLAPSSKSTSGGTAALGCLVKDYFPEPVTVSWNSGALTSGVHTFPAVLQSSGLYSLSSVVTVPSSSLGTQTYICNVNHKPSNTKVDKRVEPKSCDKTHTCPPCPAPELLGGPSVFLFPPKPKDTLMISRTPEVTCVVVDVSHEDPEVKFNWYVDGVEVHNAKTKPREEQYNSTYRVVSVLTVLHQDWLNGKEYKCKVSNKALPAPIEKTISKAKGQPREPQVYTLPPSRDELTKNQVSLTCLVKGFYPSDIAVEWESNGQPENNYKTTPPVLDSDGSFFLYSKLTVDKSRWQQGNVFSCSVMHEALHNHYTQKSLSLSPGK

SEQ ID NO: 6 - protein, 118 aa, Artificial Sequence
  source: /note="Description of Artificial Sequence: Synthetic polypeptide"
  source: /note="Ipilimumab, CTLA-4, Heavy chain variable region"
QVQLVESGGGVVQPGRSLRLSCAASGFTFSSYTMHWVRQAPGKGLEWVTFISYDGNNKYYADSVKGRFTISRDNSKNTLYLQMNSLRAEDTAIYYCARTGWLGPFDYWGQGTLVTVSS

SEQ ID NO: 7 - protein, 215 aa, Artificial Sequence
  source: /note="Description of Artificial Sequence: Synthetic polypeptide"
  source: /note="Ipilimumab, CTLA-4, Light chain"
EIVLTQSPGTLSLSPGERATLSCRASQSVGSSYLAWYQQKPGQAPRLLIYGAFSRATGIPDRFSGSGSGTDFTLTISRLEPEDFAVYYCQQYGSSPWTFGQGTKVEIKRTVAAPSVFIFPPSDEQLKSGTASVVCLLNNFYPREAKVQWKVDNALQSGNSQESVTEQDSKDSTYSLSSTLTLSKADYEKHKVYACEVTHQGLSSPVTKSFNRGEC

SEQ ID NO: 8 - protein, 108 aa, Artificial Sequence
  source: /note="Description of Artificial Sequence: Synthetic polypeptide"
  source: /note="Ipilimumab, CTLA-4, Light chain variable region"
EIVLTQSPGTLSLSPGERATLSCRASQSVGSSYLAWYQQKPGQAPRLLIYGAFSRATGIPDRFSGSGSGTDFTLTISRLEPEDFAVYYCQQYGSSPWTFGQGTKVEIK

SEQ ID NO: 9 - protein, 411 aa, Artificial Sequence
  source: /note="Description of Artificial Sequence: Synthetic polypeptide"
  source: /note="Tremelimumab (CP675206), CTLA-4, Heavy chain"
PGKGLEWVAVIWYDGSNKYYADSVKGRFTISRDNSKNTLYLQMNSLRAEDTAVYYCARDPRGATLYYYYYGMDVWGQGTTVTVSSASTKGPSVFPLAPCSRSTSESTAALGCLVKDYFPEPVTVSWNSGALTSGVHTFPAVLQSSGLYSLSSVVTVPSSNFGTQTYTCNVDHKPSNTKVDKTVERKCCVECPPCPAPPVAGPSVFLFPPKPKDTLMISRTPEVTCVVVDVSHEDPEVQFNWYVDGVEVHNAKTKPREEQFNSTFRVVSVLTVVHQDWLNGKEYKCKVSNKGLPAPIEKTISKTKGQPREPQVYTLPPSREEMTKNQVSLTCLVKGFYPSDIAVEWESNGQPENNYKTTPPMLDSDGSFFLYSKLTVDKSRWQQGNVFSCSVMHEALHNHYTQKSLSLSPGK

SEQ ID NO: 10 - protein, 214 aa, Artificial Sequence
  source: /note="Description of Artificial Sequence: Synthetic polypeptide"
  source: /note="Tremelimumab (CP675206), CTLA-4, Light chain"
DIQMTQSPSSLSASVGDRVTITCRASQSINSYLDWYQQKPGKAPKLLIYAASSLQSGVPSRFSGSGSGTDFTLTISSLQPEDFATYYCQQYYSTPFTFGPGTKVEIKRTVAAPSVFIFPPSDEQLKSGTASVVCLLNNFYPREAKVQWKVDNALQSGNSQESVTEQDSKDSTYSLSSTLTLSKADYEKHKVYACEVTHQGLSSPVTKSFNRGEC

SEQ ID NO: 11 - protein, 442 aa, Artificial Sequence
  source: /note="Description of Artificial Sequence: Synthetic polypeptide"
  source: /note="PF-05082566, 4-1BB (CD137, TNFRSF9), Heavy chain"
EVQLVQSGAEVKKPGESLRISCKGSGYSFSTYWISWVRQMPGKGLEWMGKIYPGDSYTNYSPSFQGQVTISADKSISTAYLQWSSLKASDTAMYYCARGYGIFDYWGQGTLVTVSSASTKGPSVFPLAPCSRSTSESTAALGCLVKDYFPEPVTVSWNSGALTSGVHTFPAVLQSSGLYSLSSVVTVPSSNFGTQTYTCNVDHKPSNTKVDKTVERKCCVECPPCPAPPVAGPSVFLFPPKPKDTLMISRTPEVTCVVVDVSHEDPEVQFNWYVDGVEVHNAKTKPREEQFNSTFRVVSVLTVVHQDWLNGKEYKCKVSNKGLPAPIEKTISKTKGQPREPQVYTLPPSREEMTKNQVSLTCLVKGFYPSDIAVEWESNGQPENNYKTTPPMLDSDGSFFLYSKLTVDKSRWQQGNVFSCSVMHEALHNHYTQKSLSLSPGK

SEQ ID NO: 12 - protein, 214 aa, Artificial Sequence
  source: /note="Description of Artificial Sequence: Synthetic polypeptide"
  source: /note="PF-05082566, 4-1BB (CD137, TNFRSF9), Light chain"
SYELTQPPSVSVSPGQTASITCSGDNIGDQYAHWYQQKPGQSPVLVIYQDKNRPSGIPERFSGSNSGNTATLTISGTQAMDEADYYCATYTGFGSLAVFGGGTKLTVLGQPKAAPSVTLFPPSSEELQANKATLVCLISDFYPGAVTVAWKADSSPVKAGVETTTPSKQSNNKYAASSYLSLTPEQWKSHRSYSCQVTHEGSTVEKTVAPTECS

SEQ ID NO: 13 - protein, 448 aa, Artificial Sequence
  source: /note="Description of Artificial Sequence: Synthetic polypeptide"
  source: /note="Urelumab, 4-1BB (CD137, TNFRSF9), Heavy chain"
QVQLQQWGAGLLKPSETLSLTCAVYGGSFSGYYWSWIRQSPEKGLEWIGEINHGGYVTYNPSLESRVTISVDTSKNQFSLKLSSVTAADTAVYYCARDYGPGNYDWYFDLWGRGTLVTVSSASTKGPSVFPLAPCSRSTSESTAALGCLVKDYFPEPVTVSWNSGALTSGVHTFPAVLQSSGLYSLSSVVTVPSSSLGTKTYTCNVDHKPSNTKVDKRVESKYGPPCPPCPAPEFLGGPSVFLFPPKPKDTLMISRTPEVTCVVVDVSQEDPEVQFNWYVDGVEVHNAKTKPREEQFNSTYRVVSVLTVLHQDWLNGKEYKCKVSNKGLPSSIEKTISKAKGQPREPQVYTLPPSQEEMTKNQVSLTCLVKGFYPSDIAVEWESNGQPENNYKTTPPVLDSDGSFFLYSRLTVDKSRWQEGNVFSCSVMHEALHNHYTQKSLSLSLGK

SEQ ID NO: 14 - protein, 216 aa, Artificial Sequence
  source: /note="Description of Artificial Sequence: Synthetic polypeptide"
  source: /note="Urelumab, 4-1BB (CD137, TNFRSF9), Light chain"
EIVLTQSPATLSLSPGERATLSCRASQSVSSYLAWYQQKPGQAPRLLIYDASNRATGIPARFSGSGSGTDFTLTISSLEPEDFAVYYCQQRSNWPPALTFCGGTKVEIKRTVAAPSVFIFPPSDEQLKSGTASVVCLLNNFYPREAKVQWKVDNALQSGNSQESVTEQDSKDSTYSLSSTLTLSKADYEKHKVYACEVTHQGLSSPVTKSFNRGEC

SEQ ID NO: 15 - protein, 117 aa, Artificial Sequence
  source: /note="Description of Artificial Sequence: Synthetic polypeptide"
  source: /note="Anti-OX40 antibody (Providence Health and Services)," CD134 (OX40), Heavy chain"
EVQLVESGGGLVQPGGSLRLSCAASGFTFTNYGIHWIRQAPGKGLEWVASISPSGGLTYYRDSVKGRFTISRDDAKNSPYLQMNSLRAEDTAVYYCATGGEGIFDYWGQGTLVTVSS

SEQ ID NO: 16 - protein, 108 aa, Artificial Sequence
  source: /note="Description of Artificial Sequence: Synthetic polypeptide"
  source: /note="Anti-OX40 antibody (Providence Health and Services)," CD134 (OX40), Light chain"
DIQMTQSPSSLSASVGDRVTITCRATQSIYNALAWYQQKPGKAPKLLIYNANTLHTGVPSRFSASGSGTDSTLTISSLQPEDFATYYCQQYYDYPLTFGGGTKVEIKR

SEQ ID NO: 17 - protein, 440 aa, Artificial Sequence; identical to SEQ ID NO: 3
  source: /note="Description of Artificial Sequence: Synthetic polypeptide"
  source: /note="Nivolumab, PD-1, Heavy chain"

SEQ ID NO: 18 - protein, 113 aa, Artificial Sequence [sequence omitted]

SEQ ID NO: 19 - protein, 214 aa, Artificial Sequence; identical to SEQ ID NO: 4
  source: /note="Description of Artificial Sequence: Synthetic polypeptide"
  source: /note="Nivolumab, PD-1, Light chain"

SEQ ID NO: 20 - protein, 107 aa, Artificial Sequence [sequence omitted]

SEQ ID NO: 21 - protein, 447 aa, Artificial Sequence
  source: /note="Description of Artificial Sequence: Synthetic polypeptide"
  source: /note="Pidilizumab, PD-1, Heavy chain"
QVQLVQSGSELKKPGASVKISCKASGYTFTNYGMNWVRQAPGQGLQWMGWINTDSGESTYAEEFKGRFVFSLDTSVNTAYLQITSLTAEDTGMYFCVRVGYDALDYWGQGTLVTVSSASTKGPSVFPLAPSSKSTSGGTAALGCLVKDYFPEPVTVSWNSGALTSGVHTFPAVLQSSGLYSLSSVVTVPSSSLGTQTYICNVNHKPSNTKVDKRVEPKSCDKTHTCPPCPAPELLGGPSVFLFPPKPKDTLMISRTPEVTCVVVDVSHEDPEVKFNWYVDGVEVHNAKTKPREEQYNSTYRVVSVLTVLHQDWLNGKEYKCKVSNKALPAPIEKTISKAKGQPREPQVYTLPPSREEMTKNQVSLTCLVKGFYPSDIAVEWESNGQPENNYKTTPPVLDSDGSFFLYSKLTVDKSRWQQGNVFSCSVMHEALHNHYTQKSLSLSPGK

SEQ ID NO: 22 - skipped

SEQ ID NO: 23 - protein, 213 aa, Artificial Sequence
  source: /note="Description of Artificial Sequence: Synthetic polypeptide"
  source: /note="Pidilizumab, PD-1, Light chain"
EIVLTQSPSSLSASVGDRVTITCSARSSVSYMHWFQQKPGKAPKLWIYRTSNLASGVPSRFSGSGSGTSYCLTINSLQPEDFATYYCQQRSSFPLTFGGGTKLEIKRTVAAPSVFIFPPSDEQLKSGTASVVCLLNNFYPREAKVQWKVDNALQSGNSQESVTEQDSKDSTYSLSSTLTLSKADYEKHKVYACEVTHQGLSSPVTKSFNRGEC

SEQ ID NO: 24 - skipped

SEQ ID NO: 25 - protein, 447 aa, Artificial Sequence; identical to SEQ ID NO: 1
  source: /note="Description of Artificial Sequence: Synthetic polypeptide"
  source: /note="Pembrolizumab (MK-3475/SCH900475, lambrolizumab) PD-1, Heavy chain"

SEQ ID NO: 26 - protein, 218 aa, Artificial Sequence; identical to SEQ ID NO: 2
  source: /note="Description of Artificial Sequence: Synthetic polypeptide"
  source: /note="Pembrolizumab (MK-3475/SCH900475, lambrolizumab), PD-1, Light chain  Heavy chain variable region is described in as described in WO2009114335"

SEQ ID NO: 27 - protein, 451 aa, Artificial Sequence
  source: /note="Description of Artificial Sequence: Synthetic polypeptide"
  source: /note="Durvalumab (MEDI4736), PD-L1, Heavy chain"
EVQLVESGGGLVQPGGSLRLSCAASGFTFSRYWMSWVRQAPGKGLEWVANIKQDGSEKYYVDSVKGRFTISRDNAKNSLYLQMNSLRAEDTAVYYCAREGGWFGELAFDYWGQGTLVTVSSASTKGPSVFPLAPSSKSTSGGTAALGCLVKDYFPEPVTVSWNSGALTSGVHTFPAVLQSSGLYSLSSVVTVPSSSLGTQTYICNVNHKPSNTKVDKRVEPKSCDKTHTCPPCPAPEFEGGPSVFLFPPKPKDTLMISRTPEVTCVVVDVSHEDPEVKFNWYVDGVEVHNAKTKPREEQYNSTYRVVSVLTVLHQDWLNGKEYKCKVSNKALPASIEKTISKAKGQPREPQVYTLPPSREEMTKNQVSLTCLVKGFYPSDIAVEWESNGQPENNYKTTPPVLDSDGSFFLYSKLTVDKSRWQQGNVFSCSVMHEALHNHYTQKSLSLSPGK

SEQ ID NO: 28 - protein, 215 aa, Artificial Sequence
  source: /note="Description of Artificial Sequence: Synthetic polypeptide"
  source: /note="Durvalumab (MEDI4736), PD-L1, Light chain"
EIVLTQSPGTLSLSPGERATLSCRASQRVSSSYLAWYQQKPGQAPRLLIYDASSRATGIPDRFSGSGSGTDFTLTISRLEPEDFAVYYCQQYGSLPWTFGQGTKVEIKRTVAAPSVFIFPPSDEQLKSGTASVVCLLNNFYPREAKVQWKVDNALQSGNSQESVTEQDSKDSTYSLSSTLTLSKADYEKHKVYACEVTHQGLSSPVTKSFNRGEC

SEQ ID NO: 29 - protein, 450 aa, Artificial Sequence
  source: /note="Description of Artificial Sequence: Synthetic polypeptide"
  source: /note="Lirilumab, KIR, Heavy chain"
QVQLVQSGAEVKKPGSSVKVSCKASGGTFSFYAISWVRQAPGQGLEWMGGFIPIFGAANYAQKFQGRVTITADESTSTAYMELSSLRSDDTAVYYCARIPSGSYYYDYDMDVWGQGTTVTVSSASTKGPSVFPLAPCSRSTSESTAALGCLVKDYFPEPVTVSWNSGALTSGVHTFPAVLQSSGLYSLSSVVTVPSSSLGTKTYTCNVDHKPSNTKVDKRVESKYGPPCPPCPAPEFLGGPSVFLFPPKPKDTLMISRTPEVTCVVVDVSQEDPEVQFNWYVDGVEVHNAKTKPREEQFNSTYRVVSVLTVLHQDWLNGKEYKCKVSNKGLPSSIEKTISKAKGQPREPQVYTLPPSQEEMTKNQVSLTCLVKGFYPSDIAVEWESNGQPENNYKTTPPVLDSDGSFFLYSRLTVDKSRWQEGNVFSCSVMHEALHNHYTQKSLSLSLGK

SEQ ID NO: 30 - protein, 214 aa, Artificial Sequence
  source: /note="Description of Artificial Sequence: Synthetic polypeptide"
  source: /note="Lirilumab, KIR, Light chain"
EIVLTQSPVTLSLSPGERATLSCRASQSVSSYLAWYQQKPGQAPRLLIYDASNRATGIPARFSGSGSGTDFTLTISSLEPEDFAVYYCQQRSNWMYTFGQGTKLEIKRTVAAPSVFIFPPSDEQLKSGTASVVCLLNNFYPREAKVQWKVDNALQSGNSQESVTEQDSKDSTYSLSSTLTLSKADYEKHKVYACEVTHQGLSSPVTKSFNRGEC

SEQ ID NO: 31 - protein, 447 aa, Artificial Sequence
  source: /note="Description of Artificial Sequence: Synthetic polypeptide"
  source: /note="BMS-986016, LAG3, Heavy chain"
QVQLQQWGAGLLKPSETLSLTCAVYGGSFSDYYWNWIRQPPGKGLEWIGEINHRGSTNSNPSLKSRVTLSLDTSKNQFSLKLRSVTAADTAVYYCAFGYSDYEYNWFDPWGQGTLVTVSSASTKGPSVFPLAPCSRSTSESTAALGCLVKDYFPEPVTVSWNSGALTSGVHTFPAVLQSSGLYSLSSVVTVPSSSLGTKTYTCNVDHKPSNTKVDKRVESKYGPPCPPCPAPEFLGGPSVFLFPPKPKDTLMISRTPEVTCVVVDVSQEDPEVQFNWYVDGVEVHNAKTKPREEQFNSTYRVVSVLTVLHQDWLNGKEYKCKVSNKGLPSSIEKTISKAKGQPREPQVYTLPPSQEEMTKNQVSLTCLVKGFYPSDIAVEWESNGQPENNYKTTPPVLDSDGSFFLYSRLTVDKSRWQEGNVFSCSVMHEALHNHYTQKSLSLSLGK

SEQ ID NO: 32 - protein, 214 aa, Artificial Sequence
  source: /note="Description of Artificial Sequence: Synthetic polypeptide"
  source: /note="BMS986016, LAG3, Light chain"
EIVLTQSPATLSLSPGERATLSCRASQSISSYLAWYQQKPGQAPRLLIYDASNRATGIPARFSGSGSGTDFTLTISSLEPEDFAVYYCQQRSNWPLTFGQGTNLEIKRTVAAPSVFIFPPSDEQLKSGTASVVCLLNNFYPREAKVQWKVDNALQSGNSQESVTEQDSKDSTYSLSSTLTLSKADYEKHKVYACEVTHQGLSSPVTKSFNRGEC

SEQ ID NO: 33 - protein, 450 aa, Artificial Sequence
  source: /note="Description of Artificial Sequence: Synthetic polypeptide"
  source: /note="Avelumab (MSB0010718C), PD-L1, Heavy chain"
EVQLLESGGGLVQPGGSLRLSCAASGFTFSSYIMMWVRQAPGKGLEWVSSIYPSGGITFYADTVKGRFTISRDNSKNTLYLQMNSLRAEDTAVYYCARIKLGTVTTVDYWGQGTLVTVSSASTKGPSVFPLAPSSKSTSGGTAALGCLVKDYFPEPVTVSWNSGALTSGVHTFPAVLQSSGLYSLSSVVTVPSSSLGTQTYICNVNHKPSNTKVDKKVEPKSCDKTHTCPPCPAPELLGGPSVFLFPPKPKDTLMISRTPEVTCVVVDVSHEDPEVKFNWYVDGVEVHNAKTKPREEQYNSTYRVVSVLTVLHQDWLNGKEYKCKVSNKALPAPIEKTISKAKGQPREPQVYTLPPSRDELTKNQVSLTCLVKGFYPSDIAVEWESNGQPENNYKTTPPVLDSDGSFFLYSKLTVDKSRWQQGNVFSCSVMHEALHNHYTQKSLSLSPGK

SEQ ID NO: 34 - protein, 216 aa, Artificial Sequence
  source: /note="Description of Artificial Sequence: Synthetic polypeptide"
  source: /note="Avelumab (MSB0010718C), PD-L1, Light chain"
QSALTQPASVSGSPGQSITISCTGTSSDVGGYNYVSWYQQHPGKAPKLMIYDVSNRPSGVSNRFSGSKSGNTASLTISGLQAEDEADYYCSSYTSSSTRVFGTGTKVTVLGQPKANPTVTLFPPSSEELQANKATLVCLISDFYPGAVTVAWKADGSPVKAGVETTKPSKQSNNKYAASSYLSLTPEQWKSHRSYSCQVTHEGSTVEKTVAPTECS

SEQ ID NO: 35 - protein, 448 aa, Artificial Sequence
  source: /note="Description of Artificial Sequence: Synthetic polypeptide"
  source: /note="Atezolizumab (MPDL3280A, RG7446, RO5541267) PD-L1, Heavy chain"
EVQLVESGGGLVQPGGSLRLSCAASGFTFSDSWIHWVRQAPGKGLEWVAWISPYGGSTYYADSVKGRFTISADTSKNTAYLQMNSLRAEDTAVYYCARRHWPGGFDYWGQGTLVTVSSASTKGPSVFPLAPSSKSTSGGTAALGCLVKDYFPEPVTVSWNSGALTSGVHTFPAVLQSSGLYSLSSVVTVPSSSLGTQTYICNVNHKPSNTKVDKKVEPKSCDKTHTCPPCPAPELLGGPSVFLFPPKPKDTLMISRTPEVTCVVVDVSHEDPEVKFNWYVDGVEVHNAKTKPREEQYASTYRVVSVLTVLHQDWLNGKEYKCKVSNKALPAPIEKTISKAKGQPREPQVYTLPPSREEMTKNQVSLTCLVKGFYPSDIAVEWESNGQPENNYKTTPPVLDSDGSFFLYSKLTVDKSRWQQGNVFSCSVMHEALHNHYTQKSLSLSPGK

SEQ ID NO: 36 - protein, 118 aa, Artificial Sequence [sequence omitted]

SEQ ID NO: 37 - protein, 214 aa, Artificial Sequence
  source: /note="Description of Artificial Sequence: Synthetic polypeptide"
  source: /note="Atezolizumab (MPDL3280A, RG7446, RO5541267), PD-L1, Light chain"
DIQMTQSPSSLSASVGDRVTITCRASQDVSTAVAWYQQKPGKAPKLLIYSASFLYSGVPSRFSGSGSGTDFTLTISSLQPEDFATYYCQQYLYHPATFGQGTKVEIKRTVAAPSVFIFPPSDEQLKSGTASVVCLLNNFYPREAKVQWKVDNALQSGNSQESVTEQDSKDSTYSLSSTLTLSKADYEKHKVYACEVTHQGLSSPVTKSFNRGEC

SEQ ID NO: 38 - protein, 108 aa, Artificial Sequence
  source: /note="Description of Artificial Sequence: Synthetic polypeptide"
  source: /note="Atezolizumab (MPDL3280A, RG7446, RO5541267), PD-L1, Light chain variable region"
DIQMTQSPSSLSASVGDRVTITCRASQDVSTAVAWYQQKPGKAPKLLIYSASFLYSGVPSRFSGSGSGTDFTLTISSLQPEDFATYYCQQYLYHPATFGQGTKVEIKR

SEQ ID NO: 39 - protein, 449 aa, Artificial Sequence
  source: /note="Description of Artificial Sequence: Synthetic polypeptide"
  source: /note="Mogamulizumab, CCR4, Heavy chain"
EVQLVESGGDLVQPGRSLRLSCAASGFIFSNYGMSWVRQAPGKGLEWVATISSASTYSYYPDSVKGRFTISRDNAKNSLYLQMNSLRVEDTALYYCGRHSDGNFAFGYWGQGTLVTVSSASTKGPSVFPLAPSSKSTSGGTAALGCLVKDYFPEPVTVSWNSGALTSGVHTFPAVLQSSGLYSLSSVVTVPSSSLGTQTYICNVNHKPSNTKVDKKVEPKSCDKTHTCPPCPAPELLGGPSVFLFPPKPKDTLMISRTPEVTCVVVDVSHEDPEVKFNWYVDGVEVHNAKTKPREEQYNSTYRVVSVLTVLHQDWLNGKEYKCKVSNKALPAPIEKTISKAKGQPREPQVYTLPPSRDELTKNQVSLTCLVKGFYPSDIAVEWESNGQPENNYKTTPPVLDSDGSFFLYSKLTVDKSRWQQGNVFSCSVMHEALHNHYTQKSLSLSPGK

SEQ ID NO: 40 - protein, 219 aa, Artificial Sequence
  source: /note="Description of Artificial Sequence: Synthetic polypeptide"
  source: /note="Mogamulizumab, CCR4, Light chain"
DVLMTQSPLSLPVTPGEPASISCRSSRNIVHINGDTYLEWYLQKPGQSPQLLIYKVSNRFSGVPDRFSGSGSGTDFTLKISRVEAEDVGVYYCFQGSLLPWTFGQGTKVEIKRTVAAPSVFIFPPSDEQLKSGTASVVCLLNNFYPREAKVQWKVDNALQSGNSQESVTEQDSKDSTYSLSSTLTLSKADYEKHKVYACEVTHQGLSSPVTKSFNRGEC

SEQ ID NO: 41 - protein, 452 aa, Artificial Sequence
  source: /note="Description of Artificial Sequence: Synthetic polypeptide"
  source: /note="Varlilumab, CD27, Heavy chain"
QVQLVESGGGVVQPGRSLRLSCAASGFTFSSYDMHWVRQAPGKGLEWVAVIWYDGSNKYYADSVKGRFTISRDNSKNTLYLQMNSLRAEDTAVYYCARGSGNWGFFDYWGQGTLVTVSSASTKGPSVFPLAPSSKSTSGGTAALGCLVKDYFPEPVTVSWNSGALTSGVHTFPAVLQSSGLYSLSSVVTVPSSSLGTQTYICNVNHKPSNTKVDKKVEPKSCDKTHTCPPCPAPELLGGPSVFLFPPKPKDTLMISRTPEVTCVVVDVSHEDPEVKFNWYVDGVEVHNAKTKPREEQYNSTYRVVSVLTVLHQDWLNGKEYKCKVSNKALPAPIEKTISKAKGQPREPQVYTLPPSRDELTKNQVSLTCLVKGFYPSDIAVEWESNGQPENNYKTTPPVLDSDGSFFLYSKLTVDKSRWQQGNVFSCSVMHEALHNHYTQKSLSLSPGKGSS

SEQ ID NO: 42 - protein, 214 aa, Artificial Sequence
  source: /note="Description of Artificial Sequence: Synthetic polypeptide"
  source: /note="Varlilumab, CD27, Light chain"
DIQMTQSPSSLSASVGDRVTITCRASQGISRWLAWYQQKPEKAPKSLIYAASSLQSGVPSRFSGSGSGTDFTLTISSLQPEDFATYYCQQYNTYPRTFGQGTKVEIKRTVAAPSVFIFPPSDEQLKSGTASVVCLLNNFYPREAKVQWKVDNALQSGNSQESVTEQDSKDSTYSLSSTLTLSKADYEKHKVYACEVTHQGLSSPVTKSFNRGEC

SEQ ID NO: 43 - protein, 451 aa, Artificial Sequence
  source: /note="Description of Artificial Sequence: Synthetic polypeptide"
  source: /note="Ulocuplumab, CXCR4, Heavy chain"
EVQLVESGGGLVQPGGSLRLSCAAAGFTFSSYSMNWVRQAPGKGLEWVSYISSRSRTIYYADSVKGRFTISRDNAKNSLYLQMNSLRDEDTAVYYCARDYGGQPPYYYYYGMDVWGQGTTVTVSSASTKGPSVFPLAPCSRSTSESTAALGCLVKDYFPEPVTVSWNSGALTSGVHTFPAVLQSSGLYSLSSVVTVPSSSLGTKTYTCNVDHKPSNTKVDKRVESKYGPPCPPCPAPEFLGGPSVFLFPPKPKDTLMISRTPEVTCVVVDVSQEDPEVQFNWYVDGVEVHNAKTKPREEQFNSTYRVVSVLTVLHQDWLNGKEYKCKVSNKGLPSSIEKTISKAKGQPREPQVYTLPPSQEEMTKNQVSLTCLVKGFYPSDIAVEWESNGQPENNYKTTPPVLDSDGSFFLYSRLTVDKSRWQEGNVFSCSVMHEALHNHYTQKSLSLSLG

SEQ ID NO: 44 - protein, 214 aa, Artificial Sequence
  source: /note="Description of Artificial Sequence: Synthetic polypeptide"
  source: /note="Ulocuplumab, CXCR4, Light chain"
DIQMTQSPSSLSASVGDRVTITCRASQGISSWLAWYQQKPEKAPKSLIYAASSLQSGVPSRFSGSGSGTDFTLTISSLQPEDFVTYYCQQYNSYPRTFGQGTKVEIKRTVAAPSVFIFPPSDEQLKSGTASVVCLLNNFYPREAKVQWKVDNALQSGNSQESVTEQDSKDSTYSLSSTLTLSKADYEKHKVYACEVTHQGLSSPVTKSFNRGEC

SEQ ID NO: 45 - protein, 450 aa, Artificial Sequence
  source: /note="Description of Artificial Sequence: Synthetic polypeptide"
  source: /note="Bavituximab, Phosphatidyl Serine, Heavy chain"
EVQLQQSGPELEKPGASVKLSCKASGYSFTGYNMNWVKQSHGKSLEWIGHIDPYYGDTSYNQKFRGKATLTVDKSSSTAYMQLKSLTSEDSAVYYCVKGGYYGHWYFDVWGAGTTVTVSSASTKGPSVFPLAPSSKSTSGGTAALGCLVKDYFPEPVTVSWNSGALTSGVHTFPAVLQSSGLYSLSSVVTVPSSSLGTQTYICNVNHKPSNTKVDKKVEPKSCDKTHTCPPCPAPELLGGPSVFLFPPKPKDTLMISRTPEVTCVVVDVSHEDPEVKFNWYVDGVEVHNAKTKPREEQYNSTYRVVSVLTVLHQDWLNGKEYKCKVSNKALPAPIEKTISKAKGQPREPQVYTLPPSRDELTKNQVSLTCLVKGFYPSDIAVEWESNGQPENNYKTTPPVLDSDGSFFLYSKLTVDKSRWQQGNVFSCSVMHEALHNHYTQKSLSLSPGK

SEQ ID NO: 46 - protein, 164 aa, Artificial Sequence
  source: /note="Description of Artificial Sequence: Synthetic polypeptide"
  source: /note="Bavituxumab, Phosphatidyl Serine, Light chain"
TSSLDSGVPKRFSGSRSGSDYSLTISSLESEDFVDYYCLQYVSSPPTFGAGTKLELKRADAAPSVFIFPPSDEQLKSGTASVVCLLNNFYPREAKVQWKVDNALQSGNSQESVTEQDSKDSTYSLSSTLTLSKADYEKHKVYACEVTHQGLSSPVTKSFNRGEC

SEQ ID NO: 47 - DNA, 7584 bp, Artificial Sequence
  source: /note="Description of Artificial Sequence: Synthetic polynucleotide"
  source: /note="Tet-regulated Tryptophan operon"
taagacccactttcacatttaagttgtttttctaatccgcatatgatcaattcaaggccgaataagaaggctggctctgcaccttggtgatcaaataattcgatagcttgtcgtaataatggcggcatactatcagtagtaggtgtttccctttcttctttagcgacttgatgctcttgatcttccaatacgcaacctaaagtaaaatgccccacagcgctgagtgcatataatgcattctctagtgaaaaaccttgttggcataaaaaggctaattgattttcgagagtttcatactgtttttctgtaggccgtgtacctaaatgtacttttgctccatcgcgatgacttagtaaagcacatctaaaacttttagcgttattacgtaaaaaatcttgccagctttccccttctaaagggcaaaagtgagtatggtgcctatctaacatctcaatggctaaggcgtcgagcaaagcccgcttattttttacatgccaatacaatgtaggctgctctacacctagcttctgggcgagtttacgggttgttaaaccttcgattccgacctcattaagcagctctaatgcgctgttaatcactttacttttatctaatctagacatcattaattcctaatttttgttgacactctatcattgatagagttattttaccactccctatcagtgatagagaaaagtgaactctagaaataattttgtttaactttaagaaggagatatacatatgcaaacacaaaaaccgactctcgaactgctaacctgcgaaggcgcttatcgcgacaacccgactgcgctttttcaccagttgtgtggggatcgtccggcaacgctgctgctggaatccgcagatatcgacagcaaagatgatttaaaaagcctgctgctggtagacagtgcgctgcgcattacagcattaagtgacactgtcacaatccaggcgctttccggcaatggagaagccctgttgacactactggataacgccttgcctgcgggtgtggaaaatgaacaatcaccaaactgccgcgtactgcgcttcccgcctgtcagtccactgctggatgaagacgcccgcttatgctccctttcggtttttgacgctttccgcttattacagaatctgttgaatgtaccgaaggaagaacgagaagcaatgttcttcggcggcctgttctcttatgaccttgtggcgggatttgaaaatttaccgcaactgtcagcggaaaatagctgccctgatttctgtttttatctcgctgaaacgctgatggtgattgaccatcagaaaaaaagcactcgtattcaggccagcctgtttgctccgaatgaagaagaaaaacaacgtctcactgctcgcctgaacgaactacgtcagcaactgaccgaagccgcgccgccgctgccggtggtttccgtgccgcatatgcgttgtgaatgtaaccagagcgatgaagagttcggtggtgtagtgcgtttgttgcaaaaagcgattcgcgccggagaaattttccaggtggtgccatctcgccgtttctctctgccctgcccgtcaccgctggcagcctattacgtgctgaaaaagagtaatcccagcccgtacatgttttttatgcaggataatgatttcaccctgtttggcgcgtcgccggaaagttcgctcaagtatgacgccaccagccgccagattgagatttacccgattgccggaacacgtccacgcggtcgtcgtgccgatggttcgctggacagagacctcgacagccgcatcgaactggagatgcgtaccgatcataaagagctttctgaacatctgatgctggtggatctcgcccgtaatgacctggcacgcatttgcacacccggcagccgctacgtcgccgatctcaccaaagttgaccgttactcttacgtgatgcacctagtctcccgcgttgttggtgagctgcgccacgatctcgacgccctgcacgcttaccgcgcctgtatgaatatggggacgttaagcggtgcaccgaaagtacgcgctatgcagttaattgccgaagcagaaggtcgtcgacgcggcagctacggcggcgcggtaggttattttaccgcgcatggcgatctcgacacctgcattgtgatccgctcggcgctggtggaaaacggtatcgccaccgtgcaagccggtgctggcgtagtccttgattctgttccgcagtcggaagccgacgaaactcgtaataaagcccgcgctgtactgcgcgctattgccaccgcgcatcatgcacaggagacgttctaatggctgacattctgctgctcgataatatcgactcttttacgtacaacctggcagatcagttgcgcagcaatggtcataacgtggtgatttaccgcaaccatattccggcgcagaccttaattgaacgcctggcgacgatgagcaatccggtgctgatgctttctcctggccccggtgtgccgagcgaagccggttgtatgccggaactcctcacccgcttgcgtggcaagctgccaattattggcatttgcctcggacatcaggcgattgtcgaagcttacgggggctatgtcggtcaggcgggcgaaattcttcacggtaaagcgtcgagcattgaacatgacggtcaggcgatgtttgccggattaacaaacccgctgccagtggcgcgttatcactcgctggttggcagtaacattccggccggtttaaccatcaacgcccattttaatggcatggtgatggcggtgcgtcacgatgcagatcgcgtttgtggattccagttccatccggaatccattcttactacccagggcgctcgcctgctggaacaaacgctggcctgggcgcagcagaaactagagccaaccaacacgctgcaaccgattctggaaaaactgtatcaggcacagacgcttagccaacaagaaagccaccagctgttttcagcggtggtacgtggcgagctgaagccggaacaactggcggcggcgctggtgagcatgaaaattcgcggtgaacacccgaacgagatcgccggggcagcaaccgcgctactggaaaacgccgcgccattcccgcgcccggattatctgtttgccgatatcgtcggtactggcggtgacggcagcaacagcatcaatatttctaccgccagtgcgtttgtcgccgcggcctgcgggctgaaagtggcgaaacacggcaaccgtagcgtctccagtaaatccggctcgtcggatctgctggcggcgttcggtattaatcttgatatgaacgccgataaatcgcgccaggcgctggatgagttaggcgtctgtttcctctttgcgccgaagtatcacaccggattccgccatgcgatgccggttcgccagcaactgaaaacccgcactctgttcaacgtgctgggaccattgattaacccggcgcatccgccgctggcgctaattggtgtttatagtccggaactggtgctgccgattgccgaaaccttgcgcgtgctggggtatcaacgcgcggcagtggtgcacagcggcgggatggatgaagtttcattacacgcgccgacaatcgttgccgaactacatgacggcgaaattaagagctatcaattgaccgctgaagattttggcctgacaccctaccaccaggagcaattggcaggcggaacaccggaagaaaaccgtgacattttaacacgcttgttacaaggtaaaggcgacgccgcccatgaagcagccgtcgcggcgaatgtcgccatgttaatgcgcctgcatggccatgaagatctgcaagccaatgcgcaaaccgttcttgaggtactgcgcagtggttccgcttacgacagagtcaccgcactggcggcacgagggtaaatgatgcaaaccgttttagcgaaaatcgtcgcagacaaggcgatttgggtagaaacccgcaaagagcagcaaccgctggccagttttcagaatgaggttcagccgagcacgcgacatttttatgatgcacttcagggcgcacgcacggcgtttattctggagtgtaaaaaagcgtcgccgtcaaaaggcgtgatccgtgatgatttcgatccggcacgcattgccgccatttataaacattacgcttcggcaatttcagtgctgactgatgagaaatattttcaggggagctttgatttcctccccatcgtcagccaaatcgccccgcagccgattttatgtaaagacttcattatcgatccttaccagatctatctggcgcgctattaccaggccgatgcctgcttattaatgctttcagtactggatgacgaacaatatcgccagcttgcagccgtcgcccacagtctggagatgggtgtgctgaccgaagtcagtaatgaagaggaactggagcgcgccattgcattgggggcaaaggtcgttggcatcaacaaccgcgatctgcgcgatttgtcgattgatctcaaccgtacccgcgagcttgcgccgaaactggggcacaacgtgacggtaatcagcgaatccggcatcaatacttacgctcaggtgcgcgagttaagccacttcgctaacggctttctgattggttcggcgttgatggcccatgacgatttgaacgccgccgtgcgtcgggtgttgctgggtgagaataaagtatgtggcctgacacgtgggcaagatgctaaagcagcttatgacgcgggcgcgatttacggtgggttgatttttgttgcgacatcaccgcgttgcgtcaacgttgaacaggcgcaggaagtgatggctgcagcaccgttgcagtatgttggcgtgttccgcaatcacgatattgccgatgtggcggacaaagctaaggtgttatcgctggcggcagtgcaactgcatggtaatgaagatcagctgtatatcgacaatctgcgtgaggctctgccagcacacgtcgccatctggaaggctttaagtgtcggtgaaactcttcccgcgcgcgattttcagcacatcgataaatatgtattcgacaacggtcagggcgggagcggacaacgtttcgactggtcactattaaatggtcaatcgcttggcaacgttctgctggcggggggcttaggcgcagataactgcgtggaagcggcacaaaccggctgcgccgggcttgattttaattctgctgtagagtcgcaaccgggtatcaaagacgcacgtcttttggcctcggttttccagacgctgcgcgcatattaaggaaaggaacaatgacaacattacttaacccctattttggtgagtttggcggcatgtacgtgccacaaatcctgatgcctgctctgcgccagctggaagaagcttttgtcagcgcgcaaaaagatcctgaatttcaggctcagttcaacgacctgctgaaaaactatgccgggcgtccaaccgcgctgaccaaatgccagaacattacagccgggacgaacaccacgctgtatctgaagcgcgaagatttgctgcacggcggcgcgcataaaactaaccaggtgctcggtcaggctttactggcgaagcggatgggtaaaactgaaattattgccgaaaccggtgccggtcagcatggcgtggcgtcggcccttgccagcgccctgctcggcctgaaatgccgaatttatatgggtgccaaagacgttgaacgccagtcgcccaacgttttccggatgcgcttaatgggtgcggaagtgatcccggtacatagcggttccgcgaccctgaaagatgcctgtaatgaggcgctacgcgactggtccggcagttatgaaaccgcgcactatatgctgggtaccgcagctggcccgcatccttacccgaccattgtgcgtgagtttcagcggatgattggcgaagaaacgaaagcgcagattctggaaagagaaggtcgcctgccggatgccgttatcgcctgtgttggcggtggttcgaatgccatcggtatgtttgcagatttcatcaacgaaaccgacgtcggcctgattggtgtggagcctggcggccacggtatcgaaactggcgagcacggcgcaccgttaaaacatggtcgcgtgggcatctatttcggtatgaaagcgccgatgatgcaaaccgaagacgggcaaattgaagagtcttactccatttctgccgggctggatttcccgtccgtcggcccgcaacatgcgtatctcaacagcactggacgcgctgattacgtgtctattaccgacgatgaagccctggaagcctttaaaacgctttgcctgcatgaagggatcatcccggcgctggaatcctcccacgccctggcccatgcgctgaaaatgatgcgcgaaaatccggaaaaagagcagctactggtggttaacctttccggtcgcggcgataaagacatcttcaccgttcacgatattttgaaagcacgaggggaaatctgatggaacgctacgaatctctgtttgcccagttgaaggagcgcaaagaaggcgcattcgttcctttcgtcaccctcggtgatccgggcattgagcagtcgttgaaaattatcgatacgctaattgaagccggtgctgacgcgctggagttaggcatccccttctccgacccactggcggatggcccgacgattcaaaacgccacactgcgtgcttttgcggcgggagtaaccccggcgcagtgctttgagatgctggcactcattcgccagaagcacccgaccattcccatcggccttttgatgtatgccaacctggtgtttaacaaaggcattgatgagttttatgccgagtgcgagaaagtcggcgtcgattcggtgctggttgccgatgtgcccgtggaagagtccgcgcccttccgccaggccgcgttgcgtcataatgtcgcacctatctttatttgcccgccgaatgccgacgatgatttgctgcgccagatagcctcttacggtcgtggttacacctatttgctgtcgcgagcgggcgtgaccggcgcagaaaaccgcgccgcgttacccctcaatcatctggttgcgaagctgaaagagtacaacgctgcgcctccattgcagggatttggtatttccgccccggatcaggtaaaagccgcgattgatgcaggagctgcgggcgcgatttctggttcggccatcgttaaaatcatcgagcaacatattaatgagccagagaaaatgctggcggcactgaaagcttttgtacaaccgatgaaagcggcgacgcgcagttaatacgcatggcatggatgaccgatggtagtgtggggtctccccatgcgagagtagggaactgccaggcatcaaataaaacgaaaggctcagtcgaaagactgggcctttcgttttatctgttgtttgtcggtgaacgctctcctgagtaggacaaatccgccgggagcggatttgaacgttgcgaagcaacggcccggagggtggcgggcaggacgcccgccataaactgccaggcatcaaattaagcagaaggccatcctgacggatggcctttttgcgtggccagtgccaagcttgcatgcgtgc

SEQ ID NO: 48 - DNA, 623 bp, Artificial Sequence
  source: /note="Description of Artificial Sequence: Synthetic polynucleotide"
  source: /note="Tet repressor"
taagacccactttcacatttaagttgtttttctaatccgcatatgatcaattcaaggccgaataagaaggctggctctgcaccttggtgatcaaataattcgatagcttgtcgtaataatggcggcatactatcagtagtaggtgtttccctttcttctttagcgacttgatgctcttgatcttccaatacgcaacctaaagtaaaatgccccacagcgctgagtgcatataatgcattctctagtgaaaaaccttgttggcataaaaaggctaattgattttcgagagtttcatactgtttttctgtaggccgtgtacctaaatgtacttttgctccatcgcgatgacttagtaaagcacatctaaaacttttagcgttattacgtaaaaaatcttgccagctttccccttctaaagggcaaaagtgagtatggtgcctatctaacatctcaatggctaaggcgtcgagcaaagcccgcttattttttacatgccaatacaatgtaggctgctctacacctagcttctgggcgagtttacgggttgttaaaccttcgattccgacctcattaagcagctctaatgcgctgttaatcactttacttttatctaatctagacat

SEQ ID NO: 49 - DNA, 124 bp, Artificial Sequence
  source: /note="Description of Artificial Sequence: Synthetic polynucleotide"
  source: /note="tetR/tetA promoters and RBS and leader region"
cattaattcctaatttttgttgacactctatcattgatagagttattttaccactccctatcagtgatagagaaaagtgaactctagaaataattttgtttaactttaagaaggagatatacat

SEQ ID NO: 50 - DNA, 1562 bp, Artificial Sequence
  source: /note="Description of Artificial Sequence: Synthetic polynucleotide"
  source: /note="trpE"
atgcaaacacaaaaaccgactctcgaactgctaacctgcgaaggcgcttatcgcgacaacccgactgcgctttttcaccagttgtgtggggatcgtccggcaacgctgctgctggaatccgcagatatcgacagcaaagatgatttaaaaagcctgctgctggtagacagtgcgctgcgcattacagcattaagtgacactgtcacaatccaggcgctttccggcaatggagaagccctgttgacactactggataacgccttgcctgcgggtgtggaaaatgaacaatcaccaaactgccgcgtactgcgcttcccgcctgtcagtccactgctggatgaagacgcccgcttatgctccctttcggtttttgacgctttccgcttattacagaatctgttgaatgtaccgaaggaagaacgagaagcaatgttcttcggcggcctgttctcttatgaccttgtggcgggatttgaaaatttaccgcaactgtcagcggaaaatagctgccctgatttctgtttttatctcgctgaaacgctgatggtgattgaccatcagaaaaaaagcactcgtattcaggccagcctgtttgctccgaatgaagaagaaaaacaacgtctcactgctcgcctgaacgaactacgtcagcaactgaccgaagccgcgccgccgctgccggtggtttccgtgccgcatatgcgttgtgaatgtaaccagagcgatgaagagttcggtggtgtagtgcgtttgttgcaaaaagcgattcgcgccggagaaattttccaggtggtgccatctcgccgtttctctctgccctgcccgtcaccgctggcagcctattacgtgctgaaaaagagtaatcccagcccgtacatgttttttatgcaggataatgatttcaccctgtttggcgcgtcgccggaaagttcgctcaagtatgacgccaccagccgccagattgagatttacccgattgccggaacacgtccacgcggtcgtcgtgccgatggttcgctggacagagacctcgacagccgcatcgaactggagatgcgtaccgatcataaagagctttctgaacatctgatgctggtggatctcgcccgtaatgacctggcacgcatttgcacacccggcagccgctacgtcgccgatctcaccaaagttgaccgttactcttacgtgatgcacctagtctcccgcgttgttggtgagctgcgccacgatctcgacgccctgcacgcttaccgcgcctgtatgaatatggggacgttaagcggtgcaccgaaagtacgcgctatgcagttaattgccgaagcagaaggtcgtcgacgcggcagctacggcggcgcggtaggttattttaccgcgcatggcgatctcgacacctgcattgtgatccgctcggcgctggtggaaaacggtatcgccaccgtgcaagccggtgctggcgtagtccttgattctgttccgcagtcggaagccgacgaaactcgtaataaagcccgcgctgtactgcgcgctattgccaccgcgcatcatgcacaggagacgttcta

SEQ ID NO: 51 - DNA, 1596 bp, Artificial Sequence
  source: /note="Description of Artificial Sequence: Synthetic polynucleotide"
  source: /note="trpD"
atggctgacattctgctgctcgataatatcgactcttttacgtacaacctggcagatcagttgcgcagcaatggtcataacgtggtgatttaccgcaaccatattccggcgcagaccttaattgaacgcctggcgacgatgagcaatccggtgctgatgctttctcctggccccggtgtgccgagcgaagccggttgtatgccggaactcctcacccgcttgcgtggcaagctgccaattattggcatttgcctcggacatcaggcgattgtcgaagcttacgggggctatgtcggtcaggcgggcgaaattcttcacggtaaagcgtcgagcattgaacatgacggtcaggcgatgtttgccggattaacaaacccgctgccagtggcgcgttatcactcgctggttggcagtaacattccggccggtttaaccatcaacgcccattttaatggcatggtgatggcggtgcgtcacgatgcagatcgcgtttgtggattccagttccatccggaatccattcttactacccagggcgctcgcctgctggaacaaacgctggcctgggcgcagcagaaactagagccaaccaacacgctgcaaccgattctggaaaaactgtatcaggcacagacgcttagccaacaagaaagccaccagctgttttcagcggtggtacgtggcgagctgaagccggaacaactggcggcggcgctggtgagcatgaaaattcgcggtgaacacccgaacgagatcgccggggcagcaaccgcgctactggaaaacgccgcgccattcccgcgcccggattatctgtttgccgatatcgtcggtactggcggtgacggcagcaacagcatcaatatttctaccgccagtgcgtttgtcgccgcggcctgcgggctgaaagtggcgaaacacggcaaccgtagcgtctccagtaaatccggctcgtcggatctgctggcggcgttcggtattaatcttgatatgaacgccgataaatcgcgccaggcgctggatgagttaggcgtctgtttcctctttgcgccgaagtatcacaccggattccgccatgcgatgccggttcgccagcaactgaaaacccgcactctgttcaacgtgctgggaccattgattaacccggcgcatccgccgctggcgctaattggtgtttatagtccggaactggtgctgccgattgccgaaaccttgcgcgtgctggggtatcaacgcgcggcagtggtgcacagcggcgggatggatgaagtttcattacacgcgccgacaatcgttgccgaactacatgacggcgaaattaagagctatcaattgaccgctgaagattttggcctgacaccctaccaccaggagcaattggcaggcggaacaccggaagaaaaccgtgacattttaacacgcttgttacaaggtaaaggcgacgccgcccatgaagcagccgtcgcggcgaatgtcgccatgttaatgcgcctgcatggccatgaagatctgcaagccaatgcgcaaaccgttcttgaggtactgcgcagtggttccgcttacgacagagtcaccgcactggcggcacgagggtaa

SEQ ID NO: 52 - DNA, 1359 bp, Artificial Sequence
  source: /note="Description of Artificial Sequence: Synthetic polynucleotide"
  source: /note="trpC"
atgcaaaccgttttagcgaaaatcgtcgcagacaaggcgatttgggtagaaacccgcaaagagcagcaaccgctggccagttttcagaatgaggttcagccgagcacgcgacatttttatgatgcacttcagggcgcacgcacggcgtttattctggagtgtaaaaaagcgtcgccgtcaaaaggcgtgatccgtgatgatttcgatccggcacgcattgccgccatttataaacattacgcttcggcaatttcagtgctgactgatgagaaatattttcaggggagctttgatttcctccccatcgtcagccaaatcgccccgcagccgattttatgtaaagacttcattatcgatccttaccagatctatctggcgcgctattaccaggccgatgcctgcttattaatgctttcagtactggatgacgaacaatatcgccagcttgcagccgtcgcccacagtctggagatgggtgtgctgaccgaagtcagtaatgaagaggaactggagcgcgccattgcattgggggcaaaggtcgttggcatcaacaaccgcgatctgcgcgatttgtcgattgatctcaaccgtacccgcgagcttgcgccgaaactggggcacaacgtgacggtaatcagcgaatccggcatcaatacttacgctcaggtgcgcgagttaagccacttcgctaacggctttctgattggttcggcgttgatggcccatgacgatttgaacgccgccgtgcgtcgggtgttgctgggtgagaataaagtatgtggcctgacacgtgggcaagatgctaaagcagcttatgacgcgggcgcgatttacggtgggttgatttttgttgcgacatcaccgcgttgcgtcaacgttgaacaggcgcaggaagtgatggctgcagcaccgttgcagtatgttggcgtgttccgcaatcacgatattgccgatgtggcggacaaagctaaggtgttatcgctggcggcagtgcaactgcatggtaatgaagatcagctgtatatcgacaatctgcgtgaggctctgccagcacacgtcgccatctggaaggctttaagtgtcggtgaaactcttcccgcgcgcgattttcagcacatcgataaatatgtattcgacaacggtcagggcgggagcggacaacgtttcgactggtcactattaaatggtcaatcgcttggcaacgttctgctggcggggggcttaggcgcagataactgcgtggaagcggcacaaaccggctgcgccgggcttgattttaattctgctgtagagtcgcaaccgggtatcaaagacgcacgtcttttggcctcggttttccagacgctgcgcgcatattaa

SEQ ID NO: 53 - DNA, 1194 bp, Artificial Sequence
  source: /note="Description of Artificial Sequence: Synthetic polynucleotide"
  source: /note="trpB"
atgacaacattacttaacccctattttggtgagtttggcggcatgtacgtgccacaaatcctgatgcctgctctgcgccagctggaagaagcttttgtcagcgcgcaaaaagatcctgaatttcaggctcagttcaacgacctgctgaaaaactatgccgggcgtccaaccgcgctgaccaaatgccagaacattacagccgggacgaacaccacgctgtatctgaagcgcgaagatttgctgcacggcggcgcgcataaaactaaccaggtgctcggtcaggctttactggcgaagcggatgggtaaaactgaaattattgccgaaaccggtgccggtcagcatggcgtggcgtcggcccttgccagcgccctgctcggcctgaaatgccgaatttatatgggtgccaaagacgttgaacgccagtcgcccaacgttttccggatgcgcttaatgggtgcggaagtgatcccggtacatagcggttccgcgaccctgaaagatgcctgtaatgaggcgctacgcgactggtccggcagttatgaaaccgcgcactatatgctgggtaccgcagctggcccgcatccttacccgaccattgtgcgtgagtttcagcggatgattggcgaagaaacgaaagcgcagattctggaaagagaaggtcgcctgccggatgccgttatcgcctgtgttggcggtggttcgaatgccatcggtatgtttgcagatttcatcaacgaaaccgacgtcggcctgattggtgtggagcctggcggccacggtatcgaaactggcgagcacggcgcaccgttaaaacatggtcgcgtgggcatctatttcggtatgaaagcgccgatgatgcaaaccgaagacgggcaaattgaagagtcttactccatttctgccgggctggatttcccgtccgtcggcccgcaacatgcgtatctcaacagcactggacgcgctgattacgtgtctattaccgacgatgaagccctggaagcctttaaaacgctttgcctgcatgaagggatcatcccggcgctggaatcctcccacgccctggcccatgcgctgaaaatgatgcgcgaaaatccggaaaaagagcagctactggtggttaacctttccggtcgcggcgataaagacatcttcaccgttcacgatattttgaaagcacgaggggaaatctga

SEQ ID NO: 54 - DNA, 807 bp, Artificial Sequence
  source: /note="Description of Artificial Sequence: Synthetic polynucleotide"
  source: /note="trpA"
atggaacgctacgaatctctgtttgcccagttgaaggagcgcaaagaaggcgcattcgttcctttcgtcaccctcggtgatccgggcattgagcagtcgttgaaaattatcgatacgctaattgaagccggtgctgacgcgctggagttaggcatccccttctccgacccactggcggatggcccgacgattcaaaacgccacactgcgtgcttttgcggcgggagtaaccccggcgcagtgctttgagatgctggcactcattcgccagaagcacccgaccattcccatcggccttttgatgtatgccaacctggtgtttaacaaaggcattgatgagttttatgccgagtgcgagaaagtcggcgtcgattcggtgctggttgccgatgtgcccgtggaagagtccgcgcccttccgccaggccgcgttgcgtcataatgtcgcacctatctttatttgcccgccgaatgccgacgatgatttgctgcgccagatagcctcttacggtcgtggttacacctatttgctgtcgcgagcgggcgtgaccggcgcagaaaaccgcgccgcgttacccctcaatcatctggttgcgaagctgaaagagtacaacgctgcgcctccattgcagggatttggtatttccgccccggatcaggtaaaagccgcgattgatgcaggagctgcgggcgcgatttctggttcggccatcgttaaaatcatcgagcaacatattaatgagccagagaaaatgctggcggcactgaaagcttttgtacaaccgatgaaagcggcgacgcgcagttaa

SEQ ID NO: 55 - protein, 520 aa, Artificial Sequence
  source: /note="Description of Artificial Sequence: Synthetic polypeptide"
  source: /note="TrpE"
MQTQKPTLELLTCEGAYRDNPTALFHQLCGDRPATLLLESADIDSKDDLKSLLLVDSALRITALSDTVTIQALSGNGEALLTLLDNALPAGVENEQSPNCRVLRFPPVSPLLDEDARLCSLSVFDAFRLLQNLLNVPKEEREAMFFGGLFSYDLVAGFENLPQLSAENSCPDFCFYLAETLMVIDHQKKSTRIQASLFAPNEEEKQRLTARLNELRQQLTEAAPPLPVVSVPHMRCECNQSDEEFGGVVRLLQKAIRAGEIFQVVPSRRFSLPCPSPLAAYYVLKKSNPSPYMFFMQDNDFTLFGASPESSLKYDATSRQIEIYPIAGTRPRGRRADGSLDRDLDSRIELEMRTDHKELSEHLMLVDLARNDLARICTPGSRYVADLTKVDRYSYVMHLVSRVVGELRHDLDALHAYRACMNMGTLSGAPKVRAMQLIAEAEGRRRGSYGGAVGYFTAHGDLDTCIVIRSALVENGIATVQAGAGVVLDSVPQSEADETRNKARAVLRAIATAHHAQETF

SEQ ID NO: 56 - protein, 531 aa, Artificial Sequence
  source: /note="Description of Artificial Sequence: Synthetic polypeptide"
  source: /note="TrpD"
MADILLLDNIDSFTYNLADQLRSNGHNVVIYRNHIPAQTLIERLATMSNPVLMLSPGPGVPSEAGCMPELLTRLRGKLPIIGICLGHQAIVEAYGGYVGQAGEILHGKASSIEHDGQAMFAGLTNPLPVARYHSLVGSNIPAGLTINAHFNGMVMAVRHDADRVCGFQFHPESILTTQGARLLEQTLAWAQQKLEPTNTLQPILEKLYQAQTLSQQESHQLFSAVVRGELKPEQLAAALVSMKIRGEHPNEIAGAATALLENAAPFPRPDYLFADIVGTGGDGSNSINISTASAFVAAACGLKVAKHGNRSVSSKSGSSDLLAAFGINLDMNADKSRQALDELGVCFLFAPKYHTGFRHAMPVRQQLKTRTLFNVLGPLINPAHPPLALIGVYSPELVLPIAETLRVLGYQRAAVVHSGGMDEVSLHAPTIVAELHDGEIKSYQLTAEDFGLTPYHQEQLAGGTPEENRDILTRLLQGKGDAAHEAAVAANVAMLMRLHGHEDLQANAQTVLEVLRSGSAYDRVTALAARG

SEQ ID NO: 57 - protein, 452 aa, Artificial Sequence
  source: /note="Description of Artificial Sequence: Synthetic polypeptide"
  source: /note="TrpC"
MQTVLAKIVADKAIWVETRKEQQPLASFQNEVQPSTRHFYDALQGARTAFILECKKASPSKGVIRDDFDPARIAAIYKHYASAISVLTDEKYFQGSFDFLPIVSQIAPQPILCKDFIIDPYQIYLARYYQADACLLMLSVLDDEQYRQLAAVAHSLEMGVLTEVSNEEELERAIALGAKVVGINNRDLRDLSIDLNRTRELAPKLGHNVTVISESGINTYAQVRELSHFANGFLIGSALMAHDDLNAAVRRVLLGENKVCGLTRGQDAKAAYDAGAIYGGLIFVATSPRCVNVEQAQEVMAAAPLQYVGVFRNHDIADVADKAKVLSLAAVQLHGNEDQLYIDNLREALPAHVAIWKALSVGETLPARDFQHIDKYVFDNGQGGSGQRFDWSLLNGQSLGNVLLAGGLGADNCVEAAQTGCAGLDFNSAVESQPGIKDARLLASVFQTLRAY

SEQ ID NO: 58 - protein, 397 aa, Artificial Sequence
  source: /note="Description of Artificial Sequence: Synthetic polypeptide"
  source: /note="TrpB"
MTTLLNPYFGEFGGMYVPQILMPALRQLEEAFVSAQKDPEFQAQFNDLLKNYAGRPTALTKCQNITAGTNTTLYLKREDLLHGGAHKTNQVLGQALLAKRMGKTEIIAETGAGQHGVASALASALLGLKCRIYMGAKDVERQSPNVFRMRLMGAEVIPVHSGSATLKDACNEALRDWSGSYETAHYMLGTAAGPHPYPTIVREFQRMIGEETKAQILEREGRLPDAVIACVGGGSNAIGMFADFINETDVGLIGVEPGGHGIETGEHGAPLKHGRVGIYFGMKAPMMQTEDGQIEESYSISAGLDFPSVGPQHAYLNSTGRADYVSITDDEALEAFKTLCLHEGIIPALESSHALAHALKMMRENPEKEQLLVVNLSGRGDKDIFTVHDILKARGEI

SEQ ID NO: 59 - protein, 268 aa, Artificial Sequence
  source: /note="Description of Artificial Sequence: Synthetic polypeptide"
  source: /note="TrpA"
MERYESLFAQLKERKEGAFVPFVTLGDPGIEQSLKIIDTLIEAGADALELGIPFSDPLADGPTIQNATLRAFAAGVTPAQCFEMLALIRQKHPTIPIGLLMYANLVFNKGIDEFYAECEKVGVDSVLVADVPVEESAPFRQAALRHNVAPIFICPPNADDDLLRQIASYGRGYTYLLSRAGVTGAENRAALPLNHLVAKLKEYNAAPPLQGFGISAPDQVKAAIDAGAAGAISGSAIVKIIEQHINEPEKMLAALKAFVQPMKAATRS

SEQ ID NO: 60 - protein, 350 aa, Artificial Sequence
  source: /note="Description of Artificial Sequence: Synthetic polypeptide"
  source: /note="AroGfbr: feedback resistant 2-dehydro-3-deoxyphosphoheptonate aldolase from E. coli"
MNYQNDDLRIKEIKELLPPVALLEKFPATENAANTVAHARKAIHKILKGNDDRLLVVIGPCSIHDPVAAKEYATRLLTLREELQDELEIVMRVYFEKPRTTVGWKGLINDPHMDNSFQINDGLRIARKLLLDINDSGLPAAGEFLDMITLQYLADLMSWGAIGARTTESQVHRELASGLSCPVGFKNGTDGTIKVAIDAINAAGAPHCFLSVTKWGHSAIVNTSGNGDCHIILRGGKEPNYSAKHVAEVKEGLNKAGLPAQVMIDFSHANSSKQFKKQMDVCTDVCQQIAGGEKAIIGVMVESHLVEGNQSLESGEPLAYGKSITDACIGWDDTDALLRQLASAVKARRG

SEQ ID NO: 61 - protein, 520 aa, Artificial Sequence
  source: /note="Description of Artificial Sequence: Synthetic polypeptide"
  source: /note="TrpEfbr: feedback resistant anthranilate synthase component I from E. coli"
MQTQKPTLELLTCEGAYRDNPTALFHQLCGDRPATLLLEFADIDSKDDLKSLLLVDSALRITALSDTVTIQALSGNGEALLTLLDNALPAGVENEQSPNCRVLRFPPVSPLLDEDARLCSLSVFDAFRLLQNLLNVPKEEREAMFFGGLFSYDLVAGFENLPQLSAENSCPDFCFYLAETLMVIDHQKKSTRIQASLFAPNEEEKQRLTARLNELRQQLTEAAPPLPVVSVPHMRCECNQSDEEFGGVVRLLQKAIRAGEIFQVVPSRRFSLPCPSPLAAYYVLKKSNPSPYMFFMQDNDFTLFGASPESSLKYDATSRQIEIYPIAGTRPRGRRADGSLDRDLDSRIELEMRTDHKELSEHLMLVDLARNDLARICTPGSRYVADLTKVDRYSYVMHLVSRVVGELRHDLDALHAYRACMNMGTLSGAPKVRAMQLIAEAEGRRRGSYGGAVGYFTAHGDLDTCIVIRSALVENGIATVQAGAGVVLDSVPQSEADETRNKARAVLRAIATAHHAQETF

SEQ ID NO: 62 - protein, 410 aa, Artificial Sequence
  source: /note="Description of Artificial Sequence: Synthetic polypeptide"
  source: /note="SerA: 2-oxoglutarate reductase from E. coli Nissle"
MAKVSLEKDKIKFLLVEGVHQKALESLRAAGYTNIEFHKGALDDEQLKESIRDAHFIGLRSRTHLTEDVINAAEKLVAIGCFCIGTNQVDLDAAAKRGIPVFNAPFSNTRSVAELVIGELLLLLRGVPEANAKAHRGVWNKLAAGSFEARGKKLGIIGYGHIGTQLGILAESLGMYVYFYDIENKLPLGNATQVQHLSDLLNMSDVVSLHVPENPSTKNMMGAKEISLMKPGSLLINASRGTVVDIPALCDALASKHLAGAAIDVFPTEPATNSDPFTSPLCEFDNVLLTPHIGGSTQEAQENIGLEVAGKLIKYSDNGSTLSAVNFPEVSLPLHGGRRLMHIHENRPGVLTALNKIFAEQGVNIAAQYLQTSAQMGYVVIDIEADEDVAEKALQAMKAIPGTIRARLLY

SEQ ID NO: 63 - protein, 410 aa, Artificial Sequence
  source: /note="Description of Artificial Sequence: Synthetic polypeptide"
  source: /note="SerAfbr: feedback resistant 2-oxoglutarate reductase from E. coli Nissle"
MAKVSLEKDKIKFLLVEGVHQKALESLRAAGYTNIEFHKGALDDEQLKESIRDAHFIGLRSRTHLTEDVINAAEKLVAIGCFCIGTNQVDLDAAAKRGIPVFNAPFSNTRSVAELVIGELLLLLRGVPEANAKAHRGVWNKLAAGSFEARGKKLGIIGYGHIGTQLGILAESLGMYVYFYDIENKLPLGNATQVQHLSDLLNMSDVVSLHVPENPSTKNMMGAKEISLMKPGSLLINASRGTVVDIPALCDALASKHLAGAAIDVFPTEPATNSDPFTSPLCEFDNVLLTPHIGGSTQEAQENIGLEVAGKLIKYSDNGSTLSAVNFPEVSLPLHGGRRLMHIAEARPGVLTALNKIFAEQGVNIAAQYLQTSAQMGYVVIDIEADEDVAEKALQAMKAIPGTIRARLLY

SEQ ID NO: 64 - protein, 471 aa, Artificial Sequence
  source: /note="Description of Artificial Sequence: Synthetic polypeptide"
  source: /note="TnaA: tryptophanase from E. coli"
MENFKHLPEPFRIRVIEPVKRTTRAYREEAIIKSGMNPFLLDSEDVFIDLLTDSGTGAVTQSMQAAMMRGDEAYSGSRSYYALAESVKNIFGYQYTIPTHQGRGAEQIYIPVLIKKREQEKGLDRSKMVAFSNYFFDTTQGHSQINGCTVRNVYIKEAFDTGVRYDFKGNFDLEGLERGIEEVGPNNVPYIVATITSNSAGGQPVSLANLKVMYSIAKKYDIPVVMDSARFAENAYFIKQREAEYKDWTIEQITRETYKYADMLAMSAKKDAMVPMGGLLCMKDDSFFDVYTECRTLCVVQEGFPTYGGLEGGAMERLAVGLYDGMNLDWLAYRIAQVQYLVDGLEEIGVVCQQAGGHAAFVDAGKLLPHIPADQFPAQALACELYKVAGIRAVEIGSFLLGRDPKTGKQLPCPAELLRLTIPRATYTQTHMDFIIEAFKHVKENAANIKGLTFTYEPKVLRHFTAKLKEV

SEQ ID NO: 65 - protein, 416 aa, Artificial Sequence
  source: /note="Description of Artificial Sequence: Synthetic polypeptide"
  source: /note="Pseudomonas kynureninase, P83788"
MTTRNDCLALDAQDSLAPLRQQFALPEGVIYLDGNSLGARPVAALARAQAVIAEEWGNGLIRSWNSAGWRDLSERLGNRLATLIGARDGEVVVTDTTSINLFKVLSAALRVQATRSPERRVIVTETSNFPTDLYIAEGLADMLQQGYTLRLVDSPEELPQAIDQDTAVVMLTHVNYKTGYMHDMQALTALSHECGALAIWDLAHSAGAVPVDLHQAGADYAIGCTYKYLNGGPGSQAFVWVSPQLCDLVPQPLSGWFGHSRQFAMEPRYEPSNGIARYLCGTQPITSLAMVECGLDVFAQTDMASLRRKSLALTDLFIELVEQRCAAHELTLVTPREHAKRGSHVSFEHPEGYAVIQALIDRGVIGDYREPRIMRFGFTPLYTTFTEVWDAVQILGEILDRKTWAQAQFQVRHSVT

SEQ ID NO: 66 - protein, 465 aa, Artificial Sequence
  source: /note="Description of Artificial Sequence: Synthetic polypeptide"
  source: /note="Human, Q16719"
MEPSSLELPADTVQRIAAELKCHPTDERVALHLDEEDKLRHFRECFYIPKIQDLPPVDLSLVNKDENAIYFLGNSLGLQPKMVKTYLEEELDKWAKIAAYGHEVGKRPWITGDESIVGLMKDIVGANEKEIALMNALTVNLHLLMLSFFKPTPKRYKILLEAKAFPSDHYAIESQLQLHGLNIEESMRMIKPREGEETLRIEDILEVIEKEGDSIAVILFSGVHFYTGQHFNIPAITKAGQAKGCYVGFDLAHAVGNVELYLHDWGVDFACWCSYKYLNAGAGGIAGAFIHEKHAHTIKPALVGWFGHELSTRFKMDNKLQLIPGVCGFRISNPPILLVCSLHASLEIFKQATMKALRKKSVLLTGYLEYLIKHNYGKDKAATKKPVVNIITPSHVEERGCQLTITFSVPNKDVFQELEKRGVVCDKRNPNGIRVAPVPLYNSFHDVYKFTNLLTSILDSAETKN

SEQ ID NO: 67 - protein, 378 aa, Artificial Sequence
  source: /note="Description of Artificial Sequence: Synthetic polypeptide"
  source: /note="Shewanella, Q8E973"
MLLNVKQDFCLAGPGYLLNHSVGRPLKSTEQALKQAFFAPWQESGREPWGQWLGVIDNFTAALASLFNGQPQDFCPQVNLSSALTKIVMSLDRLTRDLTRNGGAVVLMSEIDFPSMGFALKKALPASCELRFIPKSLDVTDPNVWDAHICDDVDLVFVSHAYSNTGQQAPLAQIISLARERGCLSLVDVAQSAGILPLDLAKLQPDFMIGSSVKWLCSGPGAAYLWVNPAILPECQPQDVGWFSHENPFEFDIHDFRYHPTALRFWGGTPSIAPYAIAAHSIEYFANIGSQVMREHNLQLMEPVVQALDNELVSPQEVDKRSGTIILQFGERQPQILAALAAANISVDTRSLGIRVSPHIYNDEADIARLLGVIKANR

SEQ ID NO: 68 - DNA, 1303 bp, Artificial Sequence
  source: /note="Description of Artificial Sequence: Synthetic polynucleotide"
  source: /note="kynU (Pseudomonas)"
atgacgacccgaaatgattgcctagcgttggatgcacaggacagtctggctccgctgcgccaacaatttgcgctgccggagggtgtgatatacctggatggcaattcgctgggcgcacgtccggtagctgcgctggctcgcgcgcaggctgtgatcgcagaagaatggggcaacgggttgatccgttcatggaactctgcgggctggcgtgatctgtctgaacgcctgggtaatcgcctggctaccctgattggtgcgcgcgatggggaagtagttgttactgataccacctcgattaatctgtttaaagtgctgtcagcggcgctgcgcgtgcaagctacccgtagcccggagcgccgtgttatcgtgactgagacctcgaatttcccgaccgacctgtatattgcggaagggttggcggatatgctgcaacaaggttacactctgcgtttggtggattcaccggaagagctgccacaggctatagatcaggacaccgcggtggtgatgctgacgcacgtaaattataaaaccggttatatgcacgacatgcaggctctgaccgcgttgagccacgagtgtggggctctggcgatttgggatctggcgcactctgctggcgctgtgccggtggacctgcaccaagcgggcgcggactatgcgattggctgcacgtacaaatacctgaatggcggcccgggttcgcaagcgtttgtttgggtttcgccgcaactgtgcgacctggtaccgcagccgctgtctggttggttcggccatagtcgccaattcgcgatggagccgcgctacgaaccttctaacggcattgctcgctatctgtgcggcactcagcctattactagcttggctatggtggagtgcggcctggatgtgtttgcgcagacggatatggcttcgctgcgccgtaaaagtctggcgctgactgatctgttcatcgagctggttgaacaacgctgcgctgcacacgaactgaccctggttactccacgtgaacacgcgaaacgcggctctcacgtgtcttttgaacaccccgagggttacgctgttattcaagctctgattgatcgtggcgtgatcggcgattaccgtgagccacgtattatgcgtttcggtttcactcctctgtatactacttttacggaagtttgggatgcagtacaaatcctgggcgaaatcctggatcgtaagacttgggcgcaggctcagtttcaggtgcgccactctgttacttaaaaataaaacgaaaggctcagtcgaaagactgggcctttcgttttatctgttg

SEQ ID NO: 69 - DNA, 1450 bp, Artificial Sequence
  source: /note="Description of Artificial Sequence: Synthetic polynucleotide"
  source: /note="kynU(Human)"
atggagccttcatctttagaactgccagcggacacggtgcagcgcatcgcggcggaactgaagtgccatccgactgatgagcgtgtggcgctgcatctggacgaagaagataaactgcgccactttcgtgaatgtttttatattcctaaaattcaagacttgccgccggtagatttgagtctcgttaacaaagatgaaaacgcgatctactttctgggcaactctctgggtctgcaaccaaaaatggttaaaacgtacctggaggaagaactggataaatgggcaaaaatcgcggcttatggtcacgaagtgggcaagcgtccttggattactggcgacgagtctattgtgggtttgatgaaagatattgtgggcgcgaatgaaaaggaaattgcactgatgaatgctctgaccgttaatctgcacctgctgatgctgtctttttttaaaccgaccccgaaacgctacaaaatactgctggaagcgaaagcgtttccgtcggatcactatgctatagaaagtcaactgcagttgcatggtctgaatatcgaggaatctatgcgcatgattaaaccgcgtgagggtgaagaaacgctgcgtattgaagacattctggaagttattgaaaaagaaggtgattctatcgcagttatactgttttctggcgtgcacttttatacaggtcagcacttcaatatcccggcaatcactaaagcggggcaggcaaaaggctgctatgttggttttgacctggcgcatgcagtggggaatgttgaactgtatctgcacgattggggcgttgatttcgcgtgttggtgtagctacaaatatctgaacgctggcgcgggtggcattgctggcgcttttattcacgaaaaacacgcgcacaccattaaaccggctctggttggctggttcggtcatgagctgagtactcgctttaaaatggataacaaactgcaattgattccgggtgtttgcggcttccgtatcagcaatccgccgattctgctggtttgcagcctgcacgctagtctggaaatctttaagcaggcgactatgaaagcgctgcgcaaaaaatctgtgctgctgaccggctatctggagtatctgatcaaacacaattatggcaaagataaagctgcaactaaaaaaccggtagtgaacattatcaccccctcacacgtggaggagcgcggttgtcagctgactattactttcagtgtacctaataaagatgtgttccaggaactggaaaaacgcggcgttgtttgtgataaacgtaacccgaatggtattcgcgtggctcctgtgccgctgtacaattcattccacgatgtttataaattcaccaacctgctgacttctattctcgacagtgctgagactaaaaattaaaaataaaacgaaaggctcagtcgaaagactgggcctttcgttttatctgttg

SEQ ID NO: 70 - DNA, 1189 bp, Artificial Sequence
  source: /note="Description of Artificial Sequence: Synthetic polynucleotide"
  source: /note="kynU(Shewanella)"
atgctgctgaatgtaaaacaggacttttgcctggcaggcccgggctacctgctgaatcactcggttggccgtccgctgaaatcaactgagcaagcgctgaaacaagcattttttgctccgtggcaagagagcggtcgtgaaccgtggggccagtggctgggtgttattgataatttcactgctgcgctggcatctctgtttaatggtcaaccgcaggatttttgtccgcaggttaacctgagcagcgcgctgactaaaattgtgatgtcactggatcgtctgactcgcgatctgacccgcaatggcggtgctgttgtgctgatgtctgaaatcgatttcccatctatgggcttcgcgttgaaaaaagcgctgccagcgagctgcgaactgcgttttatcccgaaaagtctggacgtgactgatccgaacgtatgggatgcacacatctgtgatgatgtagacctggtttttgtgtctcacgcctatagtaatacgggccaacaggctccgctggcgcaaatcatctctctggcgcgtgaacgtggctgcctgtcactggtggatgtagcgcaatcagcggggattttgccgctggatctggcgaaactgcaaccggacttcatgatcggcagttcggttaaatggctgtgctcgggccctggtgcggcatatctgtgggttaatccggcgattctgccggaatgtcagccgcaggatgtgggctggttttcacatgagaatccctttgaattcgacatccacgatttccgctaccacccgactgcactgcgcttttggggtggtacgccgtcgatcgcgccttatgcgatcgcggcgcactcgatcgaatattttgccaatatcggctcgcaagtgatgcgtgaacacaacctgcaactgatggaaccggtggttcaggcgctggacaatgaactggtgagcccgcaggaagtggataaacgctcaggcactattattctgcaattcggtgaacgtcaaccgcaaattctggcggctctggctgcggcgaacatttcggtggacactcgttctttggggattcgtgttagtccgcacatttataatgatgaggcggacattgcgcgcctgctgggtgtgatcaaagcaaatcgctaaaaataaaacgaaaggctcagtcgaaagactgggcctttcgttttatctgttg

SEQ ID NO: 71 - DNA, 1242 bp, Artificial Sequence
  source: /note="Description of Artificial Sequence: Synthetic polynucleotide"
  source: /note="nupC (polynucleotide)"
gtgcacggaaatttaacctgcctcatatttggagcaaatatggaccgcgtccttcattttgtactggcacttgccgttgttgcgattctcgcactgctggtaagcagcgaccgcaaaaaaattcgtatccgttatgttattcaactgcttgttatcgaagtgttactggcgtggttcttcctgaactccgacgttggtctgggcttcgtgaaaggcttctccgaaatgttcgaaaaactgctcggttttgccaacgaagggactaacttcgtctttggtagcatgaatgatcaaggcctggcattcttcttcctgaaagtgctgtgcccaatcgtctttatctctgcgctgatcggtattctccagcatattcgcgtattgccggtgattatccgcgcaattggtttcctgctctccaaagtcaacggcatgggcaaactggaatcctttaacgccgtcagctccctgattctgggtcagtctgaaaactttattgcctataaagatatcctcggcaaaatctcccgcaatcgtatgtacaccatggcagcaacggcgatgtccaccgtgtcgatgtccatcgttggtgcatatatgaccatgctggagccgaaatacgtcgttgcggcgctggtactgaacatgttcagcacctttatcgtgctgtcgctgatcaacccttaccgtgttgatgccagtgaagaaaacattcagatgtccaacctgcacgaaggtcagagcttcttcgaaatgctgggtgaatacattctggcaggtttcaaagttgccattatcgttgccgcgatgctgatcggctttatcgccctgatcgctgcactgaacgctctgtttgctaccgtgactggctggtttggctacagcatctccttccagggcatcctgggttacatcttctatccgattgcatgggtgatgggtgttccttccagtgaagcactgcaagtgggcagtatcatggcgaccaaactggtttccaacgagttcgttgcgatgatggatctgcagaaaattgcttccacgctctctccgcgtgcggaaggcatcatctctgtgttcctggtttccttcgctaacttctcttcaatcgggattatcgcgggtgcggttaaaggcctgaatgaagagcaaggtaacgtggtttctcgcttcggtctgaaactggtttacggctctaccctggtgagtgtgctgtctgcgtcaatcgcagcactggtgctgtaa

SEQ ID NO: 72 - DNA, 2259 bp, Artificial Sequence
  source: /note="Description of Artificial Sequence: Synthetic polynucleotide"
  source: /note="xdhA"
atgcgcgtcgatgccattgctaaggtcaccgggcgggcacgatatactgacgattatattatggcgggcatgtgttacgcgaaatatgtacgtagccctatcgcacatggttatgctgtaaatattaatgatgaacaagccaggagtttgccgggcgtcctggcgatttttacctgggaagatgtgccagaaatcccattcgccacggcagggcatgcctggacacttgacgaaaacaagcgcgataccgccgatcgtgccctgctaacgcgtcatgttcgtcatcatggtgacgccgttgccatcgtcgtggcccgcgatgaactcacggcagaaaaagcggcgcaattggtcagcattgagtggcaagaattacccgttatcacctcgccagaagcggcgctggcagaagacgctgcaccaatccataacggtggcaatttactgaaacaaagcacgatgtcgacgggtaatgtccaacaaacaatcgatgccgccgactaccaggtacaggggcactatcagactcccgttattcaacattgtcatatggaaagcgtgacatcgctggcatggatggaggatgactcgcgaattaccatcgtttccagcacccagatcccgcacattgttcgccgcgtggttggtcaggcgctggatattccctggtcatgcgtacgagtcatcaaaccgtttatcggtggcggttttggtaataaacaggatgtactggaagagccaatggcggcattcctgaccagcaaacttggcggcattccggtgaaagtttcccttagccgtgaagagtgtttcctcgcaacccgtacccgccacgcttttactattgacgggcaaatgggcgtgaaccgcgacggaacattgaaaggttatagtctggatgttctgtctaacaccggcgcttatgcatctcacgggcactccattgcttctgctggggggaataaagtcgcttacctttatcctcgttgtgcctacgcttacagttcaaagacctgctataccaacctcccctcggctggtgcgatgcgtggttatggcgcgccacaagtcgtatttgccgttgagtctatgcttgatgatgccgcgacagcgttaggtattgatcctgttgaaattcgtttacgcaacgccgcccgcgaaggagatgctaatccgctcacgggaaaacgtatttacagcgcagggttgccggagtgtcttgaaaaaggccggaaaatctttgaatgggaaaaacgccgtgcagagtgccagaaccagcaaggcaatttacgtcgtggcgttggcgtcgcctgttttagctacacctctaacacctggcctgtcggcgtagaaatagcaggcgcgcgcctgttgatgaatcaggatggaaccatcaacgtgcaaagcggcgcgacggaaatcggccagggtgccgacaccgtgttctcgcaaatggtggcagaaaccgtgggagttccggtcagcgatgttcacgttatttcaacccaagataccgacgttacaccattcgaccccggcgcatttgcctcacgtcagagctatgttgccgcgcctgcgctgcgcagtgcagcactgttattaaaagagaaaatcatcgctcacgccgcagtcatgctacatcagtcagcgatgaatctgaccctgataaaaggccatatcgtgctgattgaaagaccggaagaaccgttaatgtcgttaaaagatttggcgatggacgctttctaccaccctgaacgcggcgggcagctctctgccgaaagctccatcaaaaccaccactaacccaccggcgtttggctgtacctttgttgatctgacggtcgatattgcactgtgcaaagtcaccatcaaccgcatcctcaacgttcatgattcgggccatattcttaatccgctgctggcagaaggtcaggtacacggcggaatgggaatgggcattggctgggcgctatttgaagagatgatcatcgatgcgaaaagcggcgtggtccgtaaccccaatctgctggattacaaaatgccgaccatgccggatctgccacaactggaaagcgcgttcgtcgaaatcaatgagccgcaatcagcatacggacataagtcactgggtgagccccccataattcctgtagccgctgctattcgtaacgcggtgaagatggctaccggtgttgcaatcaatacactgccgctaacgccaaaacgattatatgaagaattccatctggcaggattgatttga

SEQ ID NO: 73 - DNA, 879 bp, Artificial Sequence
  source: /note="Description of Artificial Sequence: Synthetic polynucleotide"
  source: /note="xdhB"
atgtttgattttgcttcttaccatcgcgcaaccacccttgccgatgccatcaccctgctggctgacaatccgcaggccaaattgcttgccggtggcactgacgtactgatacagcttcaccatcacaatgaccgctatcgccatattgttgatatccacaatctggcagagcttcagggaataacacaggcggaagatggcgcgctgcgaatcggctctgcgacaacatttactcagctcattgaagatcccgtaatccaacgcaatctcccggcgttatgtgctgcggctgcatcaatcgccgggccgcagatccgtaatgtcgccacctacggcggaaatatttgcaacggtgccaccagcgcagattctgccacgccaacgctaatttatgacgcgaaactggagctccactccccacgcggtgttcgtttcgtcccgattaatggctttcacaccgggccgggcaaagtgtctcttgagcatgacgaaatccttgtcgcctttcattttccgccacagccgaaagaacacgcgggcagcgcgcattttaaatatgccatgcgcgacgcaatggatatttcaacaattggctgcgccgcacattgccgactggataacggcaatttcagcgaattacgcctggcatttggtgttgccgcgccaacgccgattcgctgccaacatgccgaacagactgcacaaaatgcgccattaaacctgcaaacgctggaagccatcagcgaatcagtcctgcaagatgtcgccccgcgttcttcatggcgggccagtaaagagtttcgtctgcatctcatccagacgatgaccaaaaaagtgattagcgaagccgtcgccgcggcggggggaaaattgcaatga

SEQ ID NO: 74 - DNA, 480 bp, Artificial Sequence
  source: /note="Description of Artificial Sequence: Synthetic polynucleotide"
  source: /note="xdhC"
atgaatcacagcgaaacaattaccatcgaatgcaccattaacgggatgccttttcagcttcacgccgcgccaggaatgccgctttcggaactactccgagaacaagggcttcttagtgtcaaacaaggttgctgcgtaggcgaatgcggtgcctgtacggtgctggtcgacggcactgcgatagacagttgcttattccttgcgacctgggctgaaggaaaagagatccgcacgctggaaggtgaagcgaaaggcggtaaactttctcatgtccaactggcttatgcgaaatctggtgcagtgcaatgcgggttttgtacgccgggcctgattatggctaccacggcgatgctggcaaaaccacgcgaaaaaccattaaccattacggaaattcgtcgtggactggcgggaaatctttgtcgctgcacggggtatcagatgattgtaaatacagttctggattgcgagaaaacgaagtaa

SEQ ID NO: 75 - DNA, 1002 bp, Artificial Sequence
  source: /note="Description of Artificial Sequence: Synthetic polynucleotide"
  source: /note="Add"
atgattgataccaccctgccattaactgatatccatcgccaccttgatggcaacattcgtccccagaccattcttgaacttggccgccagtataatatctcgcttcctgcacaatccctggaaacactgattccccacgttcaggtcattgccaacgaacccgatctggtgagctttctgactaaacttgactggggcgttaaagttctcgcctctcttgatgcctgccgccgcgtggcatttgaaaacattgaagatgcagcccgtaacggcctgcactatgtcgagctgcgtttttcaccaggctacatggcaatggcacatcagctgcctgtagcgggtgttgtcgaagcggtgatcgatggcgtacgtgaaggttgccgcacctttggtgtgcaggcgaagcttatcggtattatgagccggaccttcggcgaagccgcctgtcagcaagagctggaggcctttttagcccaccgtgaccagattaccgcacttgatttagccggtgatgaacttggtttcccgggaagtctgttcctttctcatttcaaccgcgcgcgtgatgcgggctggcatattaccgtccatgcaggcgaagctgccggaccggaaagcatctggcaggcgattcgtgaactgggggcggagcgtattggacatggcgtaaaagccattgaagatcgggcgctgatggattttctcgccgagcaacaaattggtattgaatcctgtctgacctccaatattcagaccagcaccgtggcggatctggctgcacatccgctgaaaacgttccttgagcatggcattcgtgccagcattaacactgacgatccaggcgtgcagggagtggatatcattcacgaatataccgttgccgcgccagctgctgggttatcccgcgagcaaatccgccaggcacagattaatggtctggaaatggctttcctcagcgcagaggaaaaacgcgcactgcgagaaaaagtcgccgcgaagtaa

SEQ ID NO: 76 - DNA, 834 bp, Artificial Sequence
  source: /note="Description of Artificial Sequence: Synthetic polynucleotide"
  source: /note="xapA"
atgtatcaggctcagttttctcataacccactgtattgcgtagatattatcaagacttataaacctgatttcacgccacgagtggcctttattttaggttccgggctgggcgcgctggccgatcagattgagaacgcggtcgcaatttcctacgaaaagctgcctgggttcccggtaagtaccgtacacggtcatgcgggtgagctggtgctgggttatctccagggggtgccagtggcgtgtatgaaaggtcgcggacatttctacgaaggtcgtgggatgaccatcatgacggatgcaatccgtacctttaagttgctgggctgcgagttgctgttctgcaccaatgcggctggctcactgcgccctgaagtgggggccggcagtctggtcgcattgaaagatcacatcaacaccatgccgggaacgccgatggtgggtcttaatgatgaacgttttggtgagcgcttcttctcgctggcgaatgcctacgatgcggaataccgcgcactgttacaaaaagtggcgaaagaagaggggttccctctgacggagggcgtgttcgtctcatatccggggccgaatttcgagactgcggcggaaattcgcatgatgcaaattattggtggggatgttgttggtatgtctgtggtgcctgaggttatttcagctcgccattgcgaacttaaagtcgttgcggtctctgcgattaccaacatggcggaaggtctgagtgacgtgaagctttctcatgcccaaacgctggcagcagcggaactctcaaagcaaaactttattaatcttatttgcggctttctgcgcaaaattgcctga

SEQ ID NO: 77 - DNA, 720 bp, Artificial Sequence
  source: /note="Description of Artificial Sequence: Synthetic polynucleotide"
  source: /note="deoD"
atggctaccccacacattaatgcagaaatgggcgatttcgctgacgtagttttgatgccaggcgacccgctgcgtgcgaagtatattgctgaaactttccttgaagatgcccgtgaagtgaacaacgttcgcggtatgctgggcttcaccggtacttacaaaggccgcaaaatttccgtaatgggtcacggtatgggtatcccgtcctgctccatctacaccaaagaactgatcaccgatttcggcgtgaagaaaattatccgcgtgggttcctgtggcgcagttctgccgcacgtaaaactacgcgacgtcgttatcggtatgggtgcctgcaccgattccaaagttaaccgcatccgttttaaagaccatgactttgccgctatcgctgactttgacatggtgcgtaacgcggtagacgcggctaaagcactgggcgttgatgctcgcgtgggtaacctgttctccgctgacctgttctactctccggacggcgaaatgttcgacgtgatggaaaaatacggcatcctcggcgtggaaatggaagcggctggtatctacggcgtcgctgcagaatttggcgcgaaagccctgaccatctgcaccgtgtctgaccacatccgcactcacgagcagaccactgccgctgagcgtcagaccaccttcaacgacatgatcaaaatcgcactggaatccgttctgctgggcgataaagagtaa

SEQ ID NO: 78 - protein, 413 aa, Artificial Sequence
  source: /note="Description of Artificial Sequence: Synthetic polypeptide"
  source: /note="NupC (polypeptide)"
VHGNLTCLIFGANMDRVLHFVLALAVVAILALLVSSDRKKIRIRYVIQLLVIEVLLAWFFLNSDVGLGFVKGFSEMFEKLLGFANEGTNFVFGSMNDQGLAFFFLKVLCPIVFISALIGILQHIRVLPVIIRAIGFLLSKVNGMGKLESFNAVSSLILGQSENFIAYKDILGKISRNRMYTMAATAMSTVSMSIVGAYMTMLEPKYVVAALVLNMFSTFIVLSLINPYRVDASEENIQMSNLHEGQSFFEMLGEYILAGFKVAIIVAAMLIGFIALIAALNALFATVTGWFGYSISFQGILGYIFYPIAWVMGVPSSEALQVGSIMATKLVSNEFVAMMDLQKIASTLSPRAEGIISVFLVSFANFSSIGIIAGAVKGLNEEQGNVVSRFGLKLVYGSTLVSVLSASIAALVL

SEQ ID NO: 79 - protein, 752 aa, Artificial Sequence
  source: /note="Description of Artificial Sequence: Synthetic polypeptide"
  source: /note="xdhA (polypeptide)"
MRVDAIAKVTGRARYTDDYIMAGMCYAKYVRSPIAHGYAVNINDEQARSLPGVLAIFTWEDVPEIPFATAGHAWTLDENKRDTADRALLTRHVRHHGDAVAIVVARDELTAEKAAQLVSIEWQELPVITSPEAALAEDAAPIHNGGNLLKQSTMSTGNVQQTIDAADYQVQGHYQTPVIQHCHMESVTSLAWMEDDSRITIVSSTQIPHIVRRVVGQALDIPWSCVRVIKPFIGGGFGNKQDVLEEPMAAFLTSKLGGIPVKVSLSREECFLATRTRHAFTIDGQMGVNRDGTLKGYSLDVLSNTGAYASHGHSIASAGGNKVAYLYPRCAYAYSSKTCYTNLPSAGAMRGYGAPQVVFAVESMLDDAATALGIDPVEIRLRNAAREGDANPLTGKRIYSAGLPECLEKGRKIFEWEKRRAECQNQQGNLRRGVGVACFSYTSNTWPVGVEIAGARLLMNQDGTINVQSGATEIGQGADTVFSQMVAETVGVPVSDVHVISTQDTDVTPFDPGAFASRQSYVAAPALRSAALLLKEKIIAHAAVMLHQSAMNLTLIKGHIVLIERPEEPLMSLKDLAMDAFYHPERGGQLSAESSIKTTTNPPAFGCTFVDLTVDIALCKVTINRILNVHDSGHILNPLLAEGQVHGGMGMGIGWALFEEMIIDAKSGVVRNPNLLDYKMPTMPDLPQLESAFVEINEPQSAYGHKSLGEPPIIPVAAAIRNAVKMATGVAINTLPLTPKRLYEEFHLAGLI

SEQ ID NO: 80 - protein, 292 aa, Artificial Sequence
  source: /note="Description of Artificial Sequence: Synthetic polypeptide"
  source: /note="xdhB (polypeptide)"
MFDFASYHRATTLADAITLLADNPQAKLLAGGTDVLIQLHHHNDRYRHIVDIHNLAELQGITQAEDGALRIGSATTFTQLIEDPVIQRNLPALCAAAASIAGPQIRNVATYGGNICNGATSADSATPTLIYDAKLELHSPRGVRFVPINGFHTGPGKVSLEHDEILVAFHFPPQPKEHAGSAHFKYAMRDAMDISTIGCAAHCRLDNGNFSELRLAFGVAAPTPIRCQHAEQTAQNAPLNLQTLEAISESVLQDVAPRSSWRASKEFRLHLIQTMTKKVISEAVAAAGGKLQ

SEQ ID NO: 81 - protein, 292 aa, Artificial Sequence; identical to SEQ ID NO: 80
  source: /note="Description of Artificial Sequence: Synthetic polypeptide"
  source: /note="xdhC (polypeptide)"

SEQ ID NO: 82 - protein, 333 aa, Artificial Sequence
  source: /note="Description of Artificial Sequence: Synthetic polypeptide"
  source: /note="Add (polypeptide)"
MIDTTLPLTDIHRHLDGNIRPQTILELGRQYNISLPAQSLETLIPHVQVIANEPDLVSFLTKLDWGVKVLASLDACRRVAFENIEDAARNGLHYVELRFSPGYMAMAHQLPVAGVVEAVIDGVREGCRTFGVQAKLIGIMSRTFGEAACQQELEAFLAHRDQITALDLAGDELGFPGSLFLSHFNRARDAGWHITVHAGEAAGPESIWQAIRELGAERIGHGVKAIEDRALMDFLAEQQIGIESCLTSNIQTSTVADLAAHPLKTFLEHGIRASINTDDPGVQGVDIIHEYTVAAPAAGLSREQIRQAQINGLEMAFLSAEEKRALREKVAAK

SEQ ID NO: 83 - protein, 277 aa, Artificial Sequence
  source: /note="Description of Artificial Sequence: Synthetic polypeptide"
  source: /note="xapA (polypeptide)"
MYQAQFSHNPLYCVDIIKTYKPDFTPRVAFILGSGLGALADQIENAVAISYEKLPGFPVSTVHGHAGELVLGYLQGVPVACMKGRGHFYEGRGMTIMTDAIRTFKLLGCELLFCTNAAGSLRPEVGAGSLVALKDHINTMPGTPMVGLNDERFGERFFSLANAYDAEYRALLQKVAKEEGFPLTEGVFVSYPGPNFETAAEIRMMQIIGGDVVGMSVVPEVISARHCELKVVAVSAITNMAEGLSDVKLSHAQTLAAAELSKQNFINLICGFLRKIA

SEQ ID NO: 84 - protein, 239 aa, Artificial Sequence
  source: /note="Description of Artificial Sequence: Synthetic polypeptide"
  source: /note="deoD (polypeptide)"
MATPHINAEMGDFADVVLMPGDPLRAKYIAETFLEDAREVNNVRGMLGFTGTYKGRKISVMGHGMGIPSCSIYTKELITDFGVKKIIRVGSCGAVLPHVKLRDVVIGMGACTDSKVNRIRFKDHDFAAIADFDMVRNAVDAAKALGVDARVGNLFSADLFYSPDGEMFDVMEKYGILGVEMEAAGIYGVAAEFGAKALTICTVSDHIRTHEQTTAAERQTTFNDMIKIALESVLLGDKE

SEQ ID NO: 85 - DNA, 60 bp, Artificial Sequence
  source: /note="Description of Artificial Sequence: Synthetic oligonucleotide"
  source: /note="argA WT"
gcaaaaaaacagaataaaaatacaataatttcgaataatcatgcaaagaggtgtaccgtg

SEQ ID NO: 86 - DNA, 60 bp, Artificial Sequence
  source: /note="Description of Artificial Sequence: Synthetic oligonucleotide"
  source: /note="argA mutant"
gcaaaaaaacactttaaaaacttaataatttcctttaatcacttaaagaggtgtaccgtg

SEQ ID NO: 87 - DNA, 76 bp, Artificial Sequence
  source: /note="Description of Artificial Sequence: Synthetic oligonucleotide"
  source: /note="argI WT"
agacttgcaaatgaataatcatccatatagattgaattttaattcattaaggcgttagccacaggagggatctatg

SEQ ID NO: 88 - DNA, 76 bp, Artificial Sequence
  source: /note="Description of Artificial Sequence: Synthetic oligonucleotide"
  source: /note="argI mutant"
agacttgcaaacttatacttatccatatagattttgttttaatttgttaaggcgttagccacaggagggatctatg

SEQ ID NO: 89 - DNA, 160 bp, Artificial Sequence
  source: /note="Description of Artificial Sequence: Synthetic polynucleotide"
  source: /note="argCBH WT"
tcattgttgacacacctctggtcatgatagtatcaatattcatgcagtatttatgaataaaaatacactaacgttgagcgtaataaaacccaccagccgtaaggtgaatgttttacgtttaacctggcaaccagacataagaaggtgaatagccccgatg

SEQ ID NO: 90 - DNA, 160 bp, Artificial Sequence
  source: /note="Description of Artificial Sequence: Synthetic polynucleotide"
  source: /note="argCBH mutant"
tcattgttgacacacctctggtcatgatagtatcaaacttcatgggatatttatctttaaaaatacttgaacgttgagcgtaataaaacccaccagccgtaaggtgaatgttttacgtttaacctggcaaccagacataagaaggtgaatagccccgatg

SEQ ID NO: 91 - DNA, 160 bp, Artificial Sequence
  source: /note="Description of Artificial Sequence: Synthetic polynucleotide"
  source: /note="argE WT"
catcggggctattcaccttcttatgtctggttgccaggttaaacgtaaaacattcaccttacggctggtgggttttattacgctcaacgttagtgtatttttattcataaatactgcatgaatattgatactatcatgaccagaggtgtgtcaacaatga

SEQ ID NO: 92 - DNA, 160 bp, Artificial Sequence
  source: /note="Description of Artificial Sequence: Synthetic polynucleotide"
  source: /note="argE mutant"
catcggggctattcaccttcttatgtctggttgccaggttaaacgtaaaacattcaccttacggctggtgggttttattacgctcaacgttcaagtatttttaaagataaatatcccatgaagtttgatactatcatgaccagaggtgtgtcaacaatga

SEQ ID NO: 93 - DNA, 81 bp, Artificial Sequence
  source: /note="Description of Artificial Sequence: Synthetic oligonucleotide"
  source: /note="carAB WT"
agcagatttgcattgatttacgtcatcattgtgaattaatatgcaaataaagtgagtgaatattctctggagggtgttttg

SEQ ID NO: 94 - DNA, 81 bp, Artificial Sequence
  source: /note="Description of Artificial Sequence: Synthetic oligonucleotide"
  source: /note="carAB mutant"
agcagatttgcattgatttacgtcatcattgtcttttaatatcttaataactggagtgacgtttctctggagggtgttttg

SEQ ID NO: 95 - DNA, 88 bp, Artificial Sequence
  source: /note="Description of Artificial Sequence: Synthetic oligonucleotide"
  source: /note="argD WT"
tttctgattgccattcagtgattttttatgcatattttgtgattataatttcatatttatttatgcgtaacagggtgatcatgagatg

SEQ ID NO: 96 - DNA, 88 bp, Artificial Sequence
  source: /note="Description of Artificial Sequence: Synthetic oligonucleotide"
  source: /note="argD mutant"
tttctgattgccattcagtctttttttacttatattttgtctttataatcttatatttatttatgcgtaacagggtgatcatgagatg

SEQ ID NO: 97 - DNA, 219 bp, Artificial Sequence
  source: /note="Description of Artificial Sequence: Synthetic polynucleotide"
  source: /note="argG WT"
ctaatcacgtgaatgaatatccagttcactttcatttgttgaatacttttaccttctcctgctttcccttaagcgcattattttacaaaaaacacactaaactcttcctgtctccgataaaagatgattaaatgaaaactcatttattttgcataaaaattcagtgaaagcagaaatccaggctcatcatcagttaattaagcagggtgttattttatg

SEQ ID NO: 98 - DNA, 219 bp, Artificial Sequence
  source: /note="Description of Artificial Sequence: Synthetic polynucleotide"
  source: /note="argG mutant"
ctaatcaccttaatgaatcttcagttcactttcatttgttgaatacttttaccttctcctgctttcccttaagcgcattattttacaaaaaacacactaaactcttcctgtctccgataaaagatgatcttatgaaaacctttttatttcttataaaaatcttgtgaaagcagaaatccaggctcatcatcagttaattaagcagggtgttattttatg

SEQ ID NO: 99 - DNA, 233 bp, Artificial Sequence
  source: /note="Description of Artificial Sequence: Synthetic polynucleotide"
  source: /note="argG mutant"
cctgaaacgtggcaaattctactcgttttgggtaaaaaatgcaaatactgctgggatttggtgtaccgagacgggacgtaaaatctgcaggcattatagtgatccacgccacattttgtcaacgtttattgctaatcattgacggctagctcagtcctaggtacagtgctagcacccgtttttttgggctagaaataattttgtttaactttaagaaggagatatacataccc

SEQ ID NO: 100 - DNA, 1053 bp, Artificial Sequence
  source: /note="Description of Artificial Sequence: Synthetic polynucleotide"
  source: /note="Wild-type argG"
gtgatccacgccacattttgtcaacgtttattgctaatcacgtgaatgaatatccagttcactttcatttgttgaatacttttaccttctcctgctttcccttaagcgcattattttacaaaaaacacactaaactcttcctgtctccgataaaagatgattaaatgaaaactcatttattttgcataaaaattcagtgaaagcagaaatccaggctcatcatcagttaattaagcagggtgttattttatgacgacgattctcaagcatctcccggtaggtcaacgtattggtatcgctttttccggcggtctggacaccagtgccgcactgctgtggatgcgacaaaagggagcggttccttatgcatatactgcaaacctgggccagccagacgaagaggattatgatgcgatccctcgtcgtgccatggaatacggcgcggagaacgcacgtctgatcgactgccgcaaacaactggtggccgaaggtattgccgctattcagtgtggcgcatttcataacaccactggtggactgacctatttcaacacgacgccgctgggccgcgccgtgaccggcaccatgctggttgctgctatgaaagaagatggcgtgaatatctggggtgacggcagcacctataaaggaaacgatatcgaacgtttctaccgttacggtctgctgaccaatgctgaactgcagatttacaaaccgtggcttgatactgactttattgatgaactgggtggccgtcatgagatgtctgaatttatgattgcctgcggtttcgactacaaaatgtctgtcgaaaaagcttactccacggactccaacatgcttggtgcaacgcatgaagcgaaggatctggaatacctcaactccagcgtcaaaatcgtcaacccaattatgggcgtgaagttttgggatgagagcgtgaaaatcccggcagaagaagtcacagtacgctttgagcaaggtcatccggtggcgctgaacggtaaaacctttagcgacgacgtagaaatgatgctggaagctaaccgcatcggc

SEQ ID NO: 101 - DNA, 734 bp, Artificial Sequence
  source: /note="Description of Artificial Sequence: Synthetic polynucleotide"
  source: /note="Constitutive argG"
ttgacggctagctcagtcctaggtacagtgctagcacccgtttttttgggctagaaataattttgtttaactttaagaaggagatatacatacccatgacgacgattctcaagcatctcccggtaggtcaacgtattggtatcgctttttccggcggtctggacaccagtgccgcactgctgtggatgcgacaaaagggagcggttccttatgcatatactgcaaacctgggccagccagacgaagaggattatgatgcgatccctcgtcgtgccatggaatacggcgcggagaacgcacgtctgatcgactgccgcaaacaactggtggccgaaggtattgccgctattcagtgtggcgcatttcataacaccactggtggactgacctatttcaacacgacgccgctgggccgcgccgtgaccggcaccatgctggttgctgctatgaaagaagatggcgtgaatatctggggtgacggcagcacctataaaggaaacgatatcgaacgtttctaccgttacggtctgctgaccaatgctgaactgcagatttacaaaccgtggcttgatactgactttattgatgaactgggtggccgtcatgagatgtctgaatttatgattgcctgcggtttcgactacaaaatgtctgtcgaaaaagcttactccacggactccaacatgcttggtgcaacgcatgaagcgaaggatctggaatacctcaactccagc

SEQ ID NO: 102 - DNA, 1332 bp, Artificial Sequence
  source: /note="Description of Artificial Sequence: Synthetic polynucleotide"
  source: /note="Nucleotide sequence of exemplary argAfbr sequence"
atggtaaaggaacgtaaaaccgagttggtcgagggattccgccattcggttccctgtatcaatacccaccggggaaaaacgtttgtcatcatgctcggcggtgaagccattgagcatgagaatttctccagtatcgttaatgatatcgggttgttgcacagcctcggcatccgtctggtggtggtctatggcgcacgtccgcagatcgacgcaaatctggctgcgcatcaccacgaaccgctgtatcacaagaatatacgtgtgaccgacgccaaaacactggaactggtgaagcaggctgcgggaacattgcaactggatattactgctcgcctgtcgatgagtctcaataacacgccgctgcagggcgcgcatatcaacgtcgtcagtggcaattttattattgcccagccgctgggcgtcgatgacggcgtggattactgccatagcgggcgtatccggcggattgatgaagacgcgatccatcgtcaactggacagcggtgcaatagtgctaatggggccggtcgctgtttcagtcactggcgagagctttaacctgacctcggaagagattgccactcaactggccatcaaactgaaagctgaaaagatgattggtttttgctcttcccagggcgtcactaatgacgacggtgatattgtctccgaacttttccctaacgaagcgcaagcgcgggtagaagcccaggaagagaaaggcgattacaactccggtacggtgcgctttttgcgtggcgcagtgaaagcctgccgcagcggcgtgcgtcgctgtcatttaatcagttatcaggaagatggcgcgctgttgcaagagttgttctcacgcgacggtatcggtacgcagattgtgatggaaagcgccgagcagattcgtcgcgcaacaatcaacgatattggcggtattctggagttgattcgcccactggagcagcaaggtattctggtacgccgttctcgcgagcagctggagatggaaatcgacaaattcaccattattcagcgcgataacacgactattgcctgcgccgcgctctatccgttcccggaagagaagattggggaaatggcctgtgtggcagttcacccggattaccgcagttcatcaaggggtgaagttctgctggaacgcattgccgctcaggctaagcagagcggcttaagcaaattgtttgtgctgaccacgcgcagtattcactggttccaggaacgtggatttaccccagtggatattgatttactgcccgagagcaaaaagcagttgtacaactaccagcgtaaatccaaagtgttgatggcggatttagggtaa

SEQ ID NO: 103 - protein, 443 aa, Artificial Sequence
  source: /note="Description of Artificial Sequence: Synthetic polypeptide"
  source: /note="Polypeptide sequence of exemplary argAfbr sequence"
MVKERKTELVEGFRHSVPCINTHRGKTFVIMLGGEAIEHENFSSIVNDIGLLHSLGIRLVVVYGARPQIDANLAAHHHEPLYHKNIRVTDAKTLELVKQAAGTLQLDITARLSMSLNNTPLQGAHINVVSGNFIIAQPLGVDDGVDYCHSGRIRRIDEDAIHRQLDSGAIVLMGPVAVSVTGESFNLTSEEIATQLAIKLKAEKMIGFCSSQGVTNDDGDIVSELFPNEAQARVEAQEEKGDYNSGTVRFLRGAVKACRSGVRRCHLISYQEDGALLQELFSRDGIGTQIVMESAEQIRRATINDIGGILELIRPLEQQGILVRRSREQLEMEIDKFTIIQRDNTTIACAALYPFPEEKIGEMACVAVHPDYRSSSRGEVLLERIAAQAKQSGLSKLFVLTTRSIHWFQERGFTPVDIDLLPESKKQLYNYQRKSKVLMADLG

SEQ ID NO: 104 - protein, 26 aa, Artificial Sequence
  source: /note="Description of Artificial Sequence: Synthetic peptide"
  source: /note="melittin"
GIGAVLKVLTTGLPALISWIKRKKQQ

SEQ ID NO: 105 - protein, 37 aa, Artificial Sequence
  source: /note="Description of Artificial Sequence: Synthetic polypeptide"
  source: /note="LL-37"
LLGDFFRKSKEKIGKEFKRIVQRIKDFLRNLVPRTES

SEQ ID NO: 106 - protein, 35 aa, Artificial Sequence
  source: /note="Description of Artificial Sequence: Synthetic polypeptide"
  source: /note="cecropin B"
KWKVFKKIEKMGRNIRNGIVKAGPAIAVLGEAKAL

SEQ ID NO: 107 - protein, 24 aa, Artificial Sequence
  source: /note="Description of Artificial Sequence: Synthetic peptide"
  source: /note="Magainin 2"
GIGKFLHSAKKFGKAFVGEEIMNS

SEQ ID NO: 108 - protein, 10 aa, Artificial Sequence
  source: /note="Description of Artificial Sequence: Synthetic peptide"
  source: /note="EZH2"
FINDEIFVEL

SEQ ID NO: 109 - protein, 9 aa, Artificial Sequence
  source: /note="Description of Artificial Sequence: Synthetic peptide"
  source: /note="EZH2"
KYDCFLHPF

SEQ ID NO: 110 - protein, 9 aa, Artificial Sequence
  source: /note="Description of Artificial Sequence: Synthetic peptide"
  source: /note="EZH2"
KYVGIEREM

SEQ ID NO: 111 - protein, 9 aa, Artificial Sequence
  source: /note="Description of Artificial Sequence: Synthetic peptide"
  source: /note="glypican-3"
EYILSLEEL

SEQ ID NO: 112 - DNA, 18 bp, Artificial Sequence
  source: /note="Description of Artificial Sequence: Synthetic oligonucleotide"
  source: /note="consensus sequence"
ttgttgayryrtcaacwa

SEQ ID NO: 113 - DNA, 15 bp, Artificial Sequence
  source: /note="Description of Artificial Sequence: Synthetic oligonucleotide"
  source: /note="consensus sequence"
  modified_base (8)..(8): a, c, g or t
ttataatnattataa

SEQ ID NO: 114 - DNA, 22 bp, Artificial Sequence
  source: /note="Description of Artificial Sequence: Synthetic oligonucleotide"
  source: /note="LacO"
ggaattgtgagcgctcacaatt

SEQ ID NO: 115 - DNA, 24 bp, Artificial Sequence
  source: /note="Description of Artificial Sequence: Synthetic oligonucleotide"
  source: /note="UP element helps recruit RNA polymerase"
ggaaaatttttttaaaaaaaaaac

SEQ ID NO: 116 - DNA, 25 bp, Artificial Sequence
  source: /note="Description of Artificial Sequence: Synthetic oligonucleotide"
  source: /note="RBS"
ttatataaaagtgggaggtgcccga

SEQ ID NO: 117 - protein, 9 aa, Artificial Sequence
  source: /note="Description of Artificial Sequence: Synthetic peptide"
  source: /note="MAGE-A1"
KVLEYVIKV

SEQ ID NO: 118 - protein, 10 aa, Artificial Sequence
  source: /note="Description of Artificial Sequence: Synthetic peptide"
  source: /note="Melan-A / MART-1"
  VARIANT (1)..(1): /replace=" "
  MISC_FEATURE (1)..(10): /note="Variant residues given in the sequence have no preference with respect to those in the annotations for variant positions"
EAAGIGILTV

SEQ ID NO: 119 - protein, 9 aa, Artificial Sequence
  source: /note="Description of Artificial Sequence: Synthetic peptide"
  source: /note="Melan-A / MART-1"
ILTVILGVL

SEQ ID NO: 120 - protein, 11 aa, Artificial Sequence
  source: /note="Description of Artificial Sequence: Synthetic peptide"
  source: /note="Melan-A / MART-1"
  VARIANT (11)..(11): /replace=" "
  MISC_FEATURE (1)..(11): /note="Variant residues given in the sequence have no preference with respect to those in the annotations for variant positions"
AEEAAGIGILT

SEQ ID NO: 121 - protein, 11 aa, Artificial Sequence
  source: /note="Description of Artificial Sequence: Synthetic peptide"
  source: /note="Melan-A / MART-1"
RNGYRALMDKS

SEQ ID NO: 122 - protein, 12 aa, Artificial Sequence
  source: /note="Description of Artificial Sequence: Synthetic peptide"
  source: /note="Melan-A / MART-1"
EEAAGIGILTVI

SEQ ID NO: 123 - DNA, 46 bp, Artificial Sequence
  source: /note="Description of Artificial Sequence: Synthetic oligonucleotide"
  source: /note="SR34"
cgcacactggcgtcggctctggcaggatgtttcgtaattagatagc

SEQ ID NO: 124 - protein, 453 aa, Artificial Sequence
  source: /note="Description of Artificial Sequence: Synthetic polypeptide"
  source: /note="Bevacizumab (Avastin) anti-VEGF, Heavy Chain"
EVQLVESGGGLVQPGGSLRLSCAASGYTFTNYGMNWVRQAPGKGLEWVGWINTYTGEPTYAADFKRRFTFSLDTSKSTAYLQMNSLRAEDTAVYYCAKYPHYYGSSHWYFDVWGQGTLVTVSSASTKGPSVFPLAPSSKSTSGGTAALGCLVKDYFPEPVTVSWNSGALTSGVHTFPAVLQSSGLYSLSSVVTVPSSSLGTQTYICNVNHKPSNTKVDKKVEPKSCDKTHTCPPCPAPELLGGPSVFLFPPKPKDTLMISRTPEVTCVVVDVSHEDPEVKFNWYVDGVEVHNAKTKPREEQYNSTYRVVSVLTVLHQDWLNGKEYKCKVSNKALPAPIEKTISKAKGQPREPQVYTLPPSREEMTKNQVSLTCLVKGFYPSDIAVEWESNGQPENNYKTTPPVLDSDGSFFLYSKLTVDKSRWQQGNVFSCSVMHEALHNHYTQKSLSLSPGK

SEQ ID NO: 125 - protein, 214 aa, Artificial Sequence
  source: /note="Description of Artificial Sequence: Synthetic polypeptide"
  source: /note="Bevacizumab (Avastin) anti-VEGF, Light Chain"
DIQMTQSPSSLSASVGDRVTITCSASQDISNYLNWYQQKPGKAPKVLIYFTSSLHSGVPSRFSGSGSGTDFTLTISSLQPEDFATYYCQQYSTVPWTFGQGTKVEIKRTVAAPSVFIFPPSDEQLKSGTASVVCLLNNFYPREAKVQWKVDNALQSGNSQESVTEQDSKDSTYSLSSTLTLSKADYEKHKVYACEVTHQGLSSPVTKSFNRGEC

SEQ ID NO: 126 - protein, 9 aa, Artificial Sequence
  source: /note="Description of Artificial Sequence: Synthetic peptide"
  source: /note="D-peptide A"
RLYLRIGRR

SEQ ID NO: 127 - protein, 9 aa, Artificial Sequence
  source: /note="Description of Artificial Sequence: Synthetic peptide"
  source: /note="D-peptide B"
RLRLRIGRR

SEQ ID NO: 128 - protein, 9 aa, Artificial Sequence
  source: /note="Description of Artificial Sequence: Synthetic peptide"
  source: /note="D-peptide C"
ALYLAIRRR

SEQ ID NO: 129 - protein, 9 aa, Artificial Sequence
  source: /note="Description of Artificial Sequence: Synthetic peptide"
  source: /note="D-peptide D"
RLLLRIGRR

SEQ ID NO: 130 - protein, 15 aa, Artificial Sequence
  source: /note="Description of Artificial Sequence: Synthetic peptide"
  source: /note="D-K6L9"
LKLLKKLLKKLLKLL

SEQ ID NO: 131 - protein, 26 aa, Artificial Sequence
  source: /note="Description of Artificial Sequence: Synthetic peptide"
  source: /note="NRC-03"
GRRKRKWLRRIGKGVKIIGGAALDHL

SEQ ID NO: 132 - protein, 25 aa, Artificial Sequence
  source: /note="Description of Artificial Sequence: Synthetic peptide"
  source: /note="NRC-07"
RWGKWFKKATHVGKHVGKAALTAYL

SEQ ID NO: 133 - protein, 18 aa, Artificial Sequence
  source: /note="Description of Artificial Sequence: Synthetic peptide"
  source: /note="Gomesin"
ZCRRLCYKQRCVTYCRGR

SEQ ID NO: 134 - protein, 20 aa, Artificial Sequence
  source: /note="Description of Artificial Sequence: Synthetic peptide"
  source: /note="Hepcidin TH2-3"
QSHLSLCRWCCNCCRSNKGC

SEQ ID NO: 135 - protein, 33 aa, Artificial Sequence
  source: /note="Description of Artificial Sequence: Synthetic polypeptide"
  source: /note="Dermaseptin B2"
GLWSKIKEVGKEAAKAAAKAAGKAALGAVSEAV

SEQ ID NO: 136 - protein, 13 aa, Artificial Sequence
  source: /note="Description of Artificial Sequence: Synthetic peptide"
  source: /note="PTP7"
FLGALFKALSKLL

SEQ ID NO: 137 - protein, 42 aa, Artificial Sequence
  source: /note="Description of Artificial Sequence: Synthetic polypeptide"
  source: /note="MGA2"
GIGKFLHSAKKFGKAFVGEIMNSGGKKWKMRRNQFWVKVQRG

SEQ ID NO: 138 - protein, 30 aa, Artificial Sequence
  source: /note="Description of Artificial Sequence: Synthetic polypeptide"
  source: /note="HNP-1"
ACYCRIPACIAGERRYGTCIYQGRLWAFCC

SEQ ID NO: 139 - protein, 17 aa, Artificial Sequence
  source: /note="Description of Artificial Sequence: Synthetic peptide"
  source: /note="Tachyplesin"
KWCFRVCYRGICYRRCR

SEQ ID NO: 140 - protein, 15 aa, Artificial Sequence
  source: /note="Description of Artificial Sequence: Synthetic peptide"
  source: /note="Temporin-1CEa"
FVDLKKIANIINSIF

SEQ ID NO: 141 - protein, 27 aa, Artificial Sequence
  source: /note="Description of Artificial Sequence: Synthetic peptide"
  source: /note="NK-2"
KILRGVCKKIMRTFLRRISKDILTGKK

SEQ ID NO: 142 - protein, 6 aa, Artificial Sequence
  source: /note="Description of Artificial Sequence: Synthetic peptide"
  source: /note="Bovine lactoferricin B6 (Lbcin B6)"
RRWQWR

SEQ ID NO: 143 - protein, 34 aa, Artificial Sequence
  source: /note="Description of Artificial Sequence: Synthetic polypeptide"
  source: /note="Cecropin CB1"
KWKVFKKIEKMGRNIRNGIVKAGPKWKVFKKIEK

SEQ ID NO: 144 - protein, 26 aa, Artificial Sequence
  source: /note="Description of Artificial Sequence: Synthetic peptide"
  source: /note="Melittin"
GIGAVLKVLTTGLPALISWIKRKRQQ

SEQ ID NO: 145 - protein, 17 aa, Artificial Sequence
  source: /note="Description of Artificial Sequence: Synthetic peptide"
  source: /note="Tachyplesin"
KWCFRVCYRGICYRRCR

SEQ ID NO: 146 - protein, 37 aa, Artificial Sequence; identical to SEQ ID NO: 105
  source: /note="Description of Artificial Sequence: Synthetic polypeptide"
  source: /note="LL-37"

SEQ ID NO: 147 - protein, 35 aa, Artificial Sequence; identical to SEQ ID NO: 106
  source: /note="Description of Artificial Sequence: Synthetic polypeptide"
  source: /note="Cecropin B"

SEQ ID NO: 148 - protein, 23 aa, Artificial Sequence
  source: /note="Description of Artificial Sequence: Synthetic peptide"
  source: /note="Magainin 2"
GIGKFLHSAKKFGKAFVGEIMNS

SEQ ID NO: 149 - protein, 21 aa, Artificial Sequence
  source: /note="Description of Artificial Sequence: Synthetic peptide"
  source: /note="Buforin IIb"
RAGLQFPVGRLLRRLLRRLLR

SEQ ID NO: 150 - protein, 13 aa, Artificial Sequence
  source: /note="Description of Artificial Sequence: Synthetic peptide"
  source: /note="Alloferon-1"
HGVSGHGQHGVHG

SEQ ID NO: 151 - protein, 12 aa, Artificial Sequence
  source: /note="Description of Artificial Sequence: Synthetic peptide"
  source: /note="Alloferon-2"
GVSGHGQHGVHG

SEQ ID NO: 152 - protein, 253 aa, Artificial Sequence
  source: /note="Description of Artificial Sequence: Synthetic polypeptide"
  source: /note="interleukin-12 subunit alpha precursor (homo sapiens)"
MWPPGSASQPPPSPAAATGLHPAARPVSLQCRLSMCPARSLLLVATLVLLDHLSLARNLPVATPDPGMFPCLHHSQNLLRAVSNMLQKARQTLEFYPCTSEEIDHEDITKDKTSTVEACLPLELTKNESCLNSRETSFITNGSCLASRKTSFMMALCLSSIYEDLKMYQVEFKTMNAKLLMDPKRQIFLDQNMLAVIDELMQALNFNSETVPQKSSLEEPDFYKTKIKLCILLHAFRIRAVTIDRVMSYLNAS

SEQ ID NO: 153 - protein, 328 aa, Artificial Sequence
  source: /note="Description of Artificial Sequence: Synthetic polypeptide"
  source: /note="interleukin-12 subunit beta precursor (homo sapiens)"
MCHQQLVISWFSLVFLASPLVAIWELKKDVYVVELDWYPDAPGEMVVLTCDTPEEDGITWTLDQSSEVLGSGKTLTIQVKEFGDAGQYTCHKGGEVLSHSLLLLHKKEDGIWSTDILKDQKEPKNKTFLRCEAKNYSGRFTCWWLTTISTDLTFSVKSSRGSSDPQGVTCGAATLSAERVRGDNKEYEYSVECQEDSACPAAEESLPIEVMVDAVHKLKYENYTSSFFIRDIIKPDPPKNLQLKPLKNSRQVEVSWEYPDTWSTPHSYFSLTFCVQVQGKSKREKKDRVFTDKTSATVICRKNASISVRAQDRYYSSSWSEWASVPCS

SEQ ID NO: 154 - protein, 162 aa, Artificial Sequence
  source: /note="Description of Artificial Sequence: Synthetic polypeptide"
  source: /note="interleukin-15 isoform1 preproprotein (homo sapiens)"
MRISKPHLRSISIQCYLCLLLNSHFLTEAGIHVFILGCFSAGLPKTEANWVNVISDLKKIEDLIQSMHIDATLYTESDVHPSCKVTAMKCFLLELQVISLESGDASIHDTVENLIILANNSLSSNGNVTESGCKECEELEEKNIKEFLQSFVHIVQMFINTS

SEQ ID NO: 155 - protein, 135 aa, Artificial Sequence
  source: /note="Description of Artificial Sequence: Synthetic polypeptide"
  source: /note="interleukin-15 isoform 2 preproprotein (homo sapiens)"
MVLGTIDLCSCFSAGLPKTEANWVNVISDLKKIEDLIQSMHIDATLYTESDVHPSCKVTAMKCFLLELQVISLESGDASIHDTVENLIILANNSLSSNGNVTESGCKECEELEEKNIKEFLQSFVHIVQMFINTS

SEQ ID NO: 156 - protein, 153 aa, Artificial Sequence
  source: /note="Description of Artificial Sequence: Synthetic polypeptide"
  source: /note="interleukin-2 precursor (homo sapiens)"
MYRMQLLSCIALSLALVTNSAPTSSSTKKTQLQLEHLLLDLQMILNGINNYKNPKLTRMLTFKFYMPKKATELKHLQCLEEELKPLEEVLNLAQSKNFHLRPRDLISNINVIVLELKGSETTFMCEYADETATIVEFLNRWITFCQSIISTLT

SEQ ID NO: 157 - protein, 162 aa, Artificial Sequence
  source: /note="Description of Artificial Sequence: Synthetic polypeptide"
  source: /note="interleukin-21 isoform 1 precursor (homo sapiens)"
MRSSPGNMERIVICLMVIFLGTLVHKSSSQGQDRHMIRMRQLIDIVDQLKNYVNDLVPEFLPAPEDVETNCEWSAFSCFQKAQLKSANTGNNERIINVSIKKLKRKPPSTNAGRRQKHRLTCPSCDSYEKKPPKEFLERFKSLLQKMIHQHLSSRTHGSEDS

SEQ ID NO: 158 - protein, 153 aa, Artificial Sequence
  source: /note="Description of Artificial Sequence: Synthetic polypeptide"
  source: /note="interleukin-21 isoform 2 precursor (homo sapiens)"
MRSSPGNMERIVICLMVIFLGTLVHKSSSQGQDRHMIRMRQLIDIVDQLKNYVNDLVPEFLPAPEDVETNCEWSAFSCFQKAQLKSANTGNNERIINVSIKKLKRKPPSTNAGRRQKHRLTCPSCDSYEKKPPKEFLERFKSLLQKVSTLSFI

SEQ ID NO: 159 - protein, 144 aa, Artificial Sequence
  source: /note="Description of Artificial Sequence: Synthetic polypeptide"
  source: /note="granulocyte-macrophage colony-stimulating factor precursor (homo sapiens)"
MWLQSLLLLGTVACSISAPARSPSPSTQPWEHVNAIQEARRLLNLSRDTAAEMNETVEVISEMFDLQEPTCLQTRLELYKQGLRGSLTKLKGPLTMMASHYKQHCPPTPETSCATQIITFESFKENLKDFLLVIPFDCWEPVQE

SEQ ID NO: 160 - protein, 10 aa, Artificial Sequence
  source: /note="Description of Artificial Sequence: Synthetic peptide"
  source: /note="alpha-actinin-4"
FIASNGVKLV

SEQ ID NO: 161 - protein, 16 aa, Artificial Sequence
  source: /note="Description of Artificial Sequence: Synthetic peptide"
  source: /note="ARTC1"
YSVYFNLPADTIYTNH

SEQ ID NO: 162 - protein, 9 aa, Artificial Sequence
  source: /note="Description of Artificial Sequence: Synthetic peptide"
  source: /note="BCR-ABL fusion protein (b3a2)"
SSKALQRPV

SEQ ID NO: 163 - protein, 9 aa, Artificial Sequence
  source: /note="Description of Artificial Sequence: Synthetic peptide"
  source: /note="BCR-ABL fusion protein (b3a2)"
GFKQSSKAL

SEQ ID NO: 164 - protein, 17 aa, Artificial Sequence
  source: /note="Description of Artificial Sequence: Synthetic peptide"
  source: /note="BCR-ABL fusion protein (b3a2)"
ATGFKQSSKALQRPVAS

SEQ ID NO: 165 - protein, 29 aa, Artificial Sequence
  source: /note="Description of Artificial Sequence: Synthetic peptide"
  source: /note="B-RAF"
EDLTVKIGDFGLATEKSRWSGSHQFEQLS

SEQ ID NO: 166 - protein, 10 aa, Artificial Sequence
  source: /note="Description of Artificial Sequence: Synthetic peptide"
  source: /note="CASP-5"
FLIIWQNTMG

SEQ ID NO: 167 - protein, 9 aa, Artificial Sequence
  source: /note="Description of Artificial Sequence: Synthetic peptide"
  source: /note="CASP-8"
FPSDSWCYF

SEQ ID NO: 168 - protein, 9 aa, Artificial Sequence
  source: /note="Description of Artificial Sequence: Synthetic peptide"
  source: /note="beta-catenin"
SYLDSGIHF

SEQ ID NO: 169 - protein, 13 aa, Artificial Sequence
  source: /note="Description of Artificial Sequence: Synthetic peptide"
  source: /note="Cdc27"
FSWAMDLDPKGAE

SEQ ID NO: 170 - protein, 10 aa, Artificial Sequence
  source: /note="Description of Artificial Sequence: Synthetic peptide"
  source: /note="CDK4"
ACDPHSGHFV

SEQ ID NO: 171 - protein, 9 aa, Artificial Sequence
  source: /note="Description of Artificial Sequence: Synthetic peptide"
  source: /note="CDK12"
CILGKLFTK

SEQ ID NO: 172 - protein, 10 aa, Artificial Sequence
  source: /note="Description of Artificial Sequence: Synthetic peptide"
  source: /note="CDKN2A"
AVCPWTWLRG

SEQ ID NO: 173 - protein, 9 aa, Artificial Sequence
  source: /note="Description of Artificial Sequence: Synthetic peptide"
  source: /note="CLPP"
ILDKVLVHL

SEQ ID NO: 174 - protein, 15 aa, Artificial Sequence
  source: /note="Description of Artificial Sequence: Synthetic peptide"
  source: /note="COA-1"
TLYQDDTLTLQAAGE

SEQ ID NO: 175 - protein, 9 aa, Artificial Sequence
  source: /note="Description of Artificial Sequence: Synthetic peptide"
  source: /note="CSNK1A1"
GLFGDIYLA

SEQ ID NO: 176 - protein, 16 aa, Artificial Sequence
  source: /note="Description of Artificial Sequence: Synthetic peptide"
  source: /note="dek-can fusion protein"
TMKQICKKEIRRLHQY

SEQ ID NO: 177 - protein, 10 aa, Artificial Sequence
  source: /note="Description of Artificial Sequence: Synthetic peptide"
  source: /note="EFTUD2"
KILDAVVAQK

SEQ ID NO: 178 - protein, 9 aa, Artificial Sequence
  source: /note="Description of Artificial Sequence: Synthetic peptide"
  source: /note="Elongation factor 2"
ETVSEQSNV

SEQ ID NO: 179 - protein, 10 aa, Artificial Sequence
  source: /note="Description of Artificial Sequence: Synthetic peptide"
  source: /note="ETV6-AML1 fusion protein"
RIAECILGMI

SEQ ID NO: 180 - protein, 15 aa, Artificial Sequence
  source: /note="Description of Artificial Sequence: Synthetic peptide"
  source: /note="ETV6-AML1 fusion protein"
IGRIAECILGMNPSR

SEQ ID NO: 181 - protein, 10 aa, Artificial Sequence
  source: /note="Description of Artificial Sequence: Synthetic peptide"
  source: /note="FLT3-ITD"
YVDFREYEYY

SEQ ID NO: 182 - protein, 9 aa, Artificial Sequence
  source: /note="Description of Artificial Sequence: Synthetic peptide"
  source: /note="FNDC3B"
VVMSWAPPV

SEQ ID NO: 183 - protein, 14 aa, Artificial Sequence
  source: /note="Description of Artificial Sequence: Synthetic peptide"
  source: /note="FN1"
MIFEKHGFRRTTPP

SEQ ID NO: 184 - protein, 10 aa, Artificial Sequence
  source: /note="Description of Artificial Sequence: Synthetic peptide"
  source: /note="GAS7"
SLADEAEVYL

SEQ ID NO: 185 - protein, 10 aa, Artificial Sequence
  source: /note="Description of Artificial Sequence: Synthetic peptide"
  source: /note="GPNMB"
TLDWLLQTPK

SEQ ID NO: 186 - protein, 9 aa, Artificial Sequence
  source: /note="Description of Artificial Sequence: Synthetic peptide"
  source: /note="HAUS3"
ILNAMIAKI

SEQ ID NO: 187 - protein, 8 aa, Artificial Sequence
  source: /note="Description of Artificial Sequence: Synthetic peptide"
  source: /note="HSDL1"
CYMEAVAL

SEQ ID NO: 188 - protein, 9 aa, Artificial Sequence
  source: /note="Description of Artificial Sequence: Synthetic peptide"
  source: /note="LDLR-fucosyltransferaseAS"
WRRAPAPGA

SEQ ID NO: 189 - protein, 9 aa, Artificial Sequence
  source: /note="Description of Artificial Sequence: Synthetic peptide"
  source: /note="fusion protein"
PVTWRRAPA

SEQ ID NO: 190-191 - skipped (2 entries)

SEQ ID NO: 192 - protein, 10 aa, Artificial Sequence
  source: /note="Description of Artificial Sequence: Synthetic peptide"
  source: /note="hsp70-2"
SLFEGIDIYT

SEQ ID NO: 193 - protein, 9 aa, Artificial Sequence
  source: /note="Description of Artificial Sequence: Synthetic peptide"
  source: /note="hsp70-2"
AEPINIQTW

SEQ ID NO: 194 - protein, 11 aa, Artificial Sequence
  source: /note="Description of Artificial Sequence: Synthetic peptide"
  source: /note="MART2"
FLEGNEVGKTY

SEQ ID NO: 195 - protein, 9 aa, Artificial Sequence
  source: /note="Description of Artificial Sequence: Synthetic peptide"
  source: /note="MATN"
KTLTSVFQK

SEQ ID NO: 196 - protein, 9 aa, Artificial Sequence
  source: /note="Description of Artificial Sequence: Synthetic peptide"
  source: /note="ME1"
FLDEFMEGV

SEQ ID NO: 197 - protein, 9 aa, Artificial Sequence
  source: /note="Description of Artificial Sequence: Synthetic peptide"
  source: /note="MUM-1f"
EEKLIVVLF

SEQ ID NO: 198 - protein, 11 aa, Artificial Sequence
  source: /note="Description of Artificial Sequence: Synthetic peptide"
  source: /note="MUM-2"
SELFRSGLDSY

SEQ ID NO: 199 - protein, 9 aa, Artificial Sequence
  source: /note="Description of Artificial Sequence: Synthetic peptide"
  source: /note="MUM-2"
FRSGLDSYV

SEQ ID NO: 200 - protein, 9 aa, Artificial Sequence
  source: /note="Description of Artificial Sequence: Synthetic peptide"
  source: /note="MUM-3"
EAFIQPITR

SEQ ID NO: 201 - protein, 12 aa, Artificial Sequence
  source: /note="Description of Artificial Sequence: Synthetic peptide"
  source: /note="neo-PAP"
RVIKNSIRLTLE

SEQ ID NO: 202 - protein, 9 aa, Artificial Sequence
  source: /note="Description of Artificial Sequence: Synthetic peptide"
  source: /note="Myosin class I"
KINKNPKYK

SEQ ID NO: 203 - protein, 8 aa, Artificial Sequence
  source: /note="Description of Artificial Sequence: Synthetic peptide"
  source: /note="NFYC"
QQITKTEV

SEQ ID NO: 204 - protein, 11 aa, Artificial Sequence
  source: /note="Description of Artificial Sequence: Synthetic peptide"
  source: /note="OGT"
SLYKFSPFPLG

SEQ ID NO: 205 - protein, 9 aa, Artificial Sequence
  source: /note="Description of Artificial Sequence: Synthetic peptide"
  source: /note="OS-9"
KELEGILLL

SEQ ID NO: 206 - protein, 9 aa, Artificial Sequence
  source: /note="Description of Artificial Sequence: Synthetic peptide"
  source: /note="p53"
VVPCEPPEV

SEQ ID NO: 207 - protein, 25 aa, Artificial Sequence
  source: /note="Description of Artificial Sequence: Synthetic peptide"
  source: /note="pml-RARalpha fusion protein"
NSNHVASGAGEAAIETQSSSSEEIV

SEQ ID NO: 208 - protein, 9 aa, Artificial Sequence
  source: /note="Description of Artificial Sequence: Synthetic peptide"
  source: /note="PPP1R3B"
YTDFHCQYV

SEQ ID NO: 209 - protein, 10 aa, Artificial Sequence
  source: /note="Description of Artificial Sequence: Synthetic peptide"
  source: /note="PRDX5"
LLLDDLLVSI

SEQ ID NO: 210 - protein, 16 aa, Artificial Sequence
  source: /note="Description of Artificial Sequence: Synthetic peptide"
  source: /note="PTPRK"
PYYFAAELPPRNLPEP

SEQ ID NO: 211 - protein, 9 aa, Artificial Sequence
  source: /note="Description of Artificial Sequence: Synthetic peptide"
  source: /note="K-ras"
VVVGAVGVG

SEQ ID NO: 212 - protein, 10 aa, Artificial Sequence
  source: /note="Description of Artificial Sequence: Synthetic peptide"
  source: /note="N-ras"
ILDTAGREEY

SEQ ID NO: 213 - protein, 9 aa, Artificial Sequence
  source: /note="Description of Artificial Sequence: Synthetic peptide"
  source: /note="RBAF600"
RPHVPESAF

SEQ ID NO: 214 - protein, 9 aa, Artificial Sequence
  source: /note="Description of Artificial Sequence: Synthetic peptide"
  source: /note="SIRT2"
KIFSEVTLK

SEQ ID NO: 215 - protein, 9 aa, Artificial Sequence
  source: /note="Description of Artificial Sequence: Synthetic peptide"
  source: /note="SNRPD1"
SHETVIIEL

SEQ ID NO: 216 - protein, 10 aa, Artificial Sequence
  source: /note="Description of Artificial Sequence: Synthetic peptide"
  source: /note="SYT-SSX1 or -SSX2 fusion protein"
QRPYGYDQIM

SEQ ID NO: 217 - protein, 10 aa, Artificial Sequence
  source: /note="Description of Artificial Sequence: Synthetic peptide"
  source: /note="TGF-betaRII"
RLSSCVPVAG

SEQ ID NO: 218 - protein, 15 aa, Artificial Sequence
  source: /note="Description of Artificial Sequence: Synthetic peptide"
  source: /note="Triosephosphate isomerase"
GELIGILNAAKVPAD

SEQ ID NO: 219 - protein, 9 aa, Artificial Sequence
  source: /note="Description of Artificial Sequence: Synthetic peptide"
  source: /note="Cyclin-A1"
FLDRFLSCM

SEQ ID NO: 220 - protein, 11 aa, Artificial Sequence
  source: /note="Description of Artificial Sequence: Synthetic peptide"
  source: /note="Cyclin-A1"
SLIAAAAFCLA

SEQ ID NO: 221 - protein, 8 aa, Artificial Sequence
  source: /note="Description of Artificial Sequence: Synthetic peptide"
  source: /note="GAGE-1,2,8"
YRPRPRRY

SEQ ID NO: 222 - protein, 9 aa, Artificial Sequence
  source: /note="Description of Artificial Sequence: Synthetic peptide"
  source: /note="GAGE-3,4,5,6,7"
YYWPRPRRY

SEQ ID NO: 223 - protein, 10 aa, Artificial Sequence
  source: /note="Description of Artificial Sequence: Synthetic peptide"
  source: /note="GnTVf"
  VARIANT (10)..(10): /replace=" "
  MISC_FEATURE (1)..(10): /note="Variant residues given in the sequence have no preference with respect to those in the annotations for variant positions"
VLPDVFIRCV

SEQ ID NO: 224 - protein, 9 aa, Artificial Sequence
  source: /note="Description of Artificial Sequence: Synthetic peptide"
  source: /note="HERV-K-MEL"
MLAVISCAV

SEQ ID NO: 225 - protein, 9 aa, Artificial Sequence
  source: /note="Description of Artificial Sequence: Synthetic peptide"
  source: /note="KK-LC-1"
RQKRILVNL

SEQ ID NO: 226 - protein, 9 aa, Artificial Sequence
  source: /note="Description of Artificial Sequence: Synthetic peptide"
  source: /note="KM-HN-1"
NYNNFYRFL

SEQ ID NO: 227 - protein, 10 aa, Artificial Sequence
  source: /note="Description of Artificial Sequence: Synthetic peptide"
  source: /note="KM-HN-1"
EYSKECLKEF

SEQ ID NO: 228 - protein, 9 aa, Artificial Sequence
  source: /note="Description of Artificial Sequence: Synthetic peptide"
  source: /note="KM-HN-1"
EYLSLSDKI

SEQ ID NO: 229 - protein, 11 aa, Artificial Sequence
  source: /note="Description of Artificial Sequence: Synthetic peptide"
  source: /note="LAGE-1"
MLMAQEALAFL

SEQ ID NO: 230 - protein, 9 aa, Artificial Sequence
  source: /note="Description of Artificial Sequence: Synthetic peptide"
  source: /note="LAGE-1"
SLLMWITQC

SEQ ID NO: 231 - protein, 10 aa, Artificial Sequence
  source: /note="Description of Artificial Sequence: Synthetic peptide"
  source: /note="LAGE-1"
LAAQERRVPR

SEQ ID NO: 232 - protein, 9 aa, Artificial Sequence
  source: /note="Description of Artificial Sequence: Synthetic peptide"
  source: /note="LAGE-1"
ELVRRILSR

SEQ ID NO: 233 - protein, 9 aa, Artificial Sequence
  source: /note="Description of Artificial Sequence: Synthetic peptide"
  source: /note="LAGE-1"
APRGVRMAV

SEQ ID NO: 234 - protein, 14 aa, Artificial Sequence
  source: /note="Description of Artificial Sequence: Synthetic peptide"
  source: /note="LAGE-1"
SLLMWITQCFLPVF

SEQ ID NO: 235 - protein, 20 aa, Artificial Sequence
  source: /note="Description of Artificial Sequence: Synthetic peptide"
  source: /note="LAGE-1"
QGAMLAAQERRVPRAAEVPR

SEQ ID NO: 236 - protein, 18 aa, Artificial Sequence
  source: /note="Description of Artificial Sequence: Synthetic peptide"
  source: /note="LAGE-1"
AADHRQLQLSISSCLQQL

SEQ ID NO: 237 - protein, 22 aa, Artificial Sequence
  source: /note="Description of Artificial Sequence: Synthetic peptide"
  source: /note="LAGE-1"
CLSRRPWKRSWSAGSCPGMPHL

SEQ ID NO: 238 - protein, 13 aa, Artificial Sequence
  source: /note="Description of Artificial Sequence: Synthetic peptide"
  source: /note="LAGE-1"
ILSRDAAPLPRPG

SEQ ID NO: 239 - protein, 14 aa, Artificial Sequence
  source: /note="Description of Artificial Sequence: Synthetic peptide"
  source: /note="LAGE-1"
AGATGGRGPRGAGA

SEQ ID NO: 240 - protein, 10 aa, Artificial Sequence
  source: /note="Description of Artificial Sequence: Synthetic peptide"
  source: /note="LY6K"
RYCNLEGPPI

SEQ ID NO: 241 - protein, 24 aa, Artificial Sequence
  source: /note="Description of Artificial Sequence: Synthetic peptide"
  source: /note="LY6K"
KWTEPYCVIAAVKIFPRFFMVAKQ

SEQ ID NO: 242 - protein, 20 aa, Artificial Sequence
  source: /note="Description of Artificial Sequence: Synthetic peptide"
  source: /note="LY6K"
KCCKIRYCNLEGPPINSSVF

SEQ ID NO: 243 - protein, 9 aa, Artificial Sequence
  source: /note="Description of Artificial Sequence: Synthetic peptide"
  source: /note="MAGE-A1"
EADPTGHSY

SEQ ID NO: 244 - protein, 9 aa, Artificial Sequence
  source: /note="Description of Artificial Sequence: Synthetic peptide"
  source: /note="MAGE-A1"
SLFRAVITK

SEQ ID NO: 245 - protein, 10 aa, Artificial Sequence
  source: /note="Description of Artificial Sequence: Synthetic peptide"
  source: /note="MAGE-A1"
EVYDGREHSA

SEQ ID NO: 246 - protein, 9 aa, Artificial Sequence
  source: /note="Description of Artificial Sequence: Synthetic peptide"
  source: /note="MAGE-A1"
RVRFFFPSL

SEQ ID NO: 247 - protein, 9 aa, Artificial Sequence
  source: /note="Description of Artificial Sequence: Synthetic peptide"
  source: /note="MAGE-A1"
EADPTGHSY

SEQ ID NO: 248 - protein, 10 aa, Artificial Sequence
  source: /note="Description of Artificial Sequence: Synthetic peptide"
  source: /note="MAGE-A1"
REPVTKAEML

SEQ ID NO: 249 - protein, 10 aa, Artificial Sequence
  source: /note="Description of Artificial Sequence: Synthetic peptide"
  source: /note="MAGE-A1"
KEADPTGHSY

SEQ ID NO: 250 - protein, 9 aa, Artificial Sequence
  source: /note="Description of Artificial Sequence: Synthetic peptide"
  source: /note="MAGE-A1"
DPARYEFLW

SEQ ID NO: 251 - protein, 11 aa, Artificial Sequence
  source: /note="Description of Artificial Sequence: Synthetic peptide"
  source: /note="MAGE-A1"
ITKKVADLVGF

SEQ ID NO: 252 - protein, 9 aa, Artificial Sequence
  source: /note="Description of Artificial Sequence: Synthetic peptide"
  source: /note="MAGE-A1"
SAFPTTINF

SEQ ID NO: 253 - protein, 9 aa, Artificial Sequence
  source: /note="Description of Artificial Sequence: Synthetic peptide"
  source: /note="MAGE-A1"
SAYGEPRKL

SEQ ID NO: 254 - protein, 9 aa, Artificial Sequence
  source: /note="Description of Artificial Sequence: Synthetic peptide"
  source: /note="MAGE-A1"
RVRFFFPSL

SEQ ID NO: 255 - protein, 9 aa, Artificial Sequence
  source: /note="Description of Artificial Sequence: Synthetic peptide"
  source: /note="MAGE-A1"
SAYGEPRKL

SEQ ID NO: 256 - protein, 15 aa, Artificial Sequence
  source: /note="Description of Artificial Sequence: Synthetic peptide"
  source: /note="MAGE-A1"
TSCILESLFRAVITK

SEQ ID NO: 257 - protein, 15 aa, Artificial Sequence
  source: /note="Description of Artificial Sequence: Synthetic peptide"
  source: /note="MAGE-A1"
PRALAETSYVKVLEY

SEQ ID NO: 258 - protein, 16 aa, Artificial Sequence
  source: /note="Description of Artificial Sequence: Synthetic peptide"
  source: /note="MAGE-A1"
FLLLKYRAREPVTKAE

SEQ ID NO: 259 - protein, 12 aa, Artificial Sequence
  source: /note="Description of Artificial Sequence: Synthetic peptide"
  source: /note="MAGE-A1"
EYVIKVSARVRF

SEQ ID NO: 260 - protein, 10 aa, Artificial Sequence
  source: /note="Description of Artificial Sequence: Synthetic peptide"
  source: /note="MAGE-A2"
YLQLVFGIEV

SEQ ID NO: 261 - protein, 9 aa, Artificial Sequence
  source: /note="Description of Artificial Sequence: Synthetic peptide"
  source: /note="MAGE-A2"
EYLQLVFGI

SEQ ID NO: 262 - protein, 10 aa, Artificial Sequence
  source: /note="Description of Artificial Sequence: Synthetic peptide"
  source: /note="MAGE-A2"
REPVTKAEML

SEQ ID NO: 263 - protein, 9 aa, Artificial Sequence
  source: /note="Description of Artificial Sequence: Synthetic peptide"
  source: /note="MAGE-A2"
EGDCAPEEK

SEQ ID NO: 264 - protein, 14 aa, Artificial Sequence
  source: /note="Description of Artificial Sequence: Synthetic peptide"
  source: /note="MAGE-A2"
LLKYRAREPVTKAE

SEQ ID NO: 265 - protein, 9 aa, Artificial Sequence
  source: /note="Description of Artificial Sequence: Synthetic peptide"
  source: /note="MAGE-A3"
EVDPIGHLY

SEQ ID NO: 266 - protein, 10 aa, Artificial Sequence
  source: /note="Description of Artificial Sequence: Synthetic peptide"
  source: /note="MAGE-A3"
FLWGPRALVD

SEQ ID NO: 267 - protein, 9 aa, Artificial Sequence
  source: /note="Description of Artificial Sequence: Synthetic peptide"
  source: /note="MAGE-A3"
KVAELVHFL

SEQ ID NO: 268 - protein, 9 aa, Artificial Sequence
  source: /note="Description of Artificial Sequence: Synthetic peptide"
  source: /note="MAGE-A3"
TFPDLESEF

SEQ ID NO: 269 - protein, 9 aa, Artificial Sequence
  source: /note="Description of Artificial Sequence: Synthetic peptide"
  source: /note="MAGE-A3"
VAELVHFLL

SEQ ID NO: 270 - protein, 10 aa, Artificial Sequence
  source: /note="Description of Artificial Sequence: Synthetic peptide"
  source: /note="MAGE-A3"
MEVDPIGHLY

SEQ ID NO: 271 - protein, 9 aa, Artificial Sequence
  source: /note="Description of Artificial Sequence: Synthetic peptide"
  source: /note="MAGE-A3"
EVDPIGHLY

SEQ ID NO: 272 - protein, 10 aa, Artificial Sequence
  source: /note="Description of Artificial Sequence: Synthetic peptide"
  source: /note="MAGE-A3"
REPVTKAEML

SEQ ID NO: 273 - protein, 10 aa, Artificial Sequence
  source: /note="Description of Artificial Sequence: Synthetic peptide"
  source: /note="MAGE-A3"
AELVHFLLLI

SEQ ID NO: 274 - protein, 10 aa, Artificial Sequence
  source: /note="Description of Artificial Sequence: Synthetic peptide"
  source: /note="MAGE-A3"
MEVDPIGHLY

SEQ ID NO: 275 - protein, 9 aa, Artificial Sequence
  source: /note="Description of Artificial Sequence: Synthetic peptide"
  source: /note="MAGE-A3"
WQYFFPVIF

SEQ ID NO: 276 - protein, 9 aa, Artificial Sequence
  source: /note="Description of Artificial Sequence: Synthetic peptide"
  source: /note="MAGE-A3"
EGDCAPEEK

SEQ ID NO: 277 - protein, 16 aa, Artificial Sequence
  source: /note="Description of Artificial Sequence: Synthetic peptide"
  source: /note="MAGE-A3"
KKLLTQHFVQENYLEY

SEQ ID NO: 278 - protein, 15 aa, Artificial Sequence
  source: /note="Description of Artificial Sequence: Synthetic peptide"
  source: /note="MAGE-A3"
RKVAELVHFLLLKYR

SEQ ID NO: 279 - protein, 16 aa, Artificial Sequence
  source: /note="Description of Artificial Sequence: Synthetic peptide"
  source: /note="MAGE-A3"
KKLLTQHFVQENYLEY

SEQ ID NO: 280 - protein, 16 aa, Artificial Sequence
  source: /note="Description of Artificial Sequence: Synthetic peptide"
  source: /note="MAGE-A3"
ACYEFLWGPRALVETS

SEQ ID NO: 281 - protein, 15 aa, Artificial Sequence
  source: /note="Description of Artificial Sequence: Synthetic peptide"
  source: /note="MAGE-A3"
RKVAELVHFLLLKYR

SEQ ID NO: 282 - protein, 12 aa, Artificial Sequence
  source: /note="Description of Artificial Sequence: Synthetic peptide"
  source: /note="MAGE-A3"
VIFSKASSSLQL

SEQ ID NO: 283 - protein, 15 aa, Artificial Sequence
  source: /note="Description of Artificial Sequence: Synthetic peptide"
  source: /note="MAGE-A3"
VFGIELMEVDPIGHL

SEQ ID NO: 284 - protein, 15 aa, Artificial Sequence
  source: /note="Description of Artificial Sequence: Synthetic peptide"
  source: /note="MAGE-A3"
GDNQIMPKAGLLIIV

SEQ ID NO: 285 - protein, 15 aa, Artificial Sequence
  source: /note="Description of Artificial Sequence: Synthetic peptide"
  source: /note="MAGE-A3"
TSYVKVLHHMVKISG

SEQ ID NO: 286 - protein, 16 aa, Artificial Sequence
  source: /note="Description of Artificial Sequence: Synthetic peptide"
  source: /note="MAGE-A3"
RKVAELVHFLLLKYRA

SEQ ID NO: 287 - protein, 16 aa, Artificial Sequence
  source: /note="Description of Artificial Sequence: Synthetic peptide"
  source: /note="MAGE-A3"
FLLLKYRAREPVTKAE

SEQ ID NO: 288 - protein, 9 aa, Artificial Sequence
  source: /note="Description of Artificial Sequence: Synthetic peptide"
  source: /note="MAGE-A4"
EVDPASNTY

SEQ ID NO: 289 - protein, 10 aa, Artificial Sequence
  source: /note="Description of Artificial Sequence: Synthetic peptide"
  source: /note="MAGE-A4"
GVYDGREHTV

SEQ ID NO: 290 - protein, 9 aa, Artificial Sequence
  source: /note="Description of Artificial Sequence: Synthetic peptide"
  source: /note="MAGE-A4"
NYKRCFPVI

SEQ ID NO: 291 - protein, 8 aa, Artificial Sequence
  source: /note="Description of Artificial Sequence: Synthetic peptide"
  source: /note="MAGE-A4"
SESLKMIF

SEQ ID NO: 292 - protein, 9 aa, Artificial Sequence
  source: /note="Description of Artificial Sequence: Synthetic peptide"
  source: /note="MAGE-A6"
MVKISGGPR

SEQ ID NO: 293 - protein, 9 aa, Artificial Sequence
  source: /note="Description of Artificial Sequence: Synthetic peptide"
  source: /note="MAGE-A6"
EVDPIGHVY

SEQ ID NO: 294 - protein, 10 aa, Artificial Sequence
  source: /note="Description of Artificial Sequence: Synthetic peptide"
  source: /note="MAGE-A6"
REPVTKAEML

SEQ ID NO: 295 - protein, 9 aa, Artificial Sequence
  source: /note="Description of Artificial Sequence: Synthetic peptide"
  source: /note="MAGE-A6"
EGDCAPEEK

SEQ ID NO: 296 - protein, 9 aa, Artificial Sequence
  source: /note="Description of Artificial Sequence: Synthetic peptide"
  source: /note="MAGE-A6"
ISGGPRISY

SEQ ID NO: 297 - protein, 14 aa, Artificial Sequence
  source: /note="Description of Artificial Sequence: Synthetic peptide"
  source: /note="MAGE-A6"
LLKYRAREPVTKAE

SEQ ID NO: 298 - protein, 9 aa, Artificial Sequence
  source: /note="Description of Artificial Sequence: Synthetic peptide"
  source: /note="MAGE-A9"
ALSVMGVYV

SEQ ID NO: 299 - protein, 10 aa, Artificial Sequence
  source: /note="Description of Artificial Sequence: Synthetic peptide"
  source: /note="MAGE-A10"
GLYDGMEHLL

SEQ ID NO: 300 - protein, 9 aa, Artificial Sequence
  source: /note="Description of Artificial Sequence: Synthetic peptide"
  source: /note="MAGE-A10"
DPARYEFLW

SEQ ID NO: 301 - protein, 10 aa, Artificial Sequence
  source: /note="Description of Artificial Sequence: Synthetic peptide"
  source: /note="MAGE-A12 m"
FLWGPRALVE

SEQ ID NO: 302 - protein, 9 aa, Artificial Sequence
  source: /note="Description of Artificial Sequence: Synthetic peptide"
  source: /note="MAGE-A12 m"
VRIGHLYIL

SEQ ID NO: 303 - protein, 9 aa, Artificial Sequence
  source: /note="Description of Artificial Sequence: Synthetic peptide"
  source: /note="MAGE-A12 m"
EGDCAPEEK

SEQ ID NO: 304 - protein, 15 aa, Artificial Sequence
  source: /note="Description of Artificial Sequence: Synthetic peptide"
  source: /note="MAGE-A12 m"
REPFTKAEMLGSVIR

SEQ ID NO: 305 - protein, 14 aa, Artificial Sequence
  source: /note="Description of Artificial Sequence: Synthetic peptide"
  source: /note="MAGE-A12 m"
AELVHFLLLKYRAR

SEQ ID NO: 306 - protein, 10 aa, Artificial Sequence
  source: /note="Description of Artificial Sequence: Synthetic peptide"
  source: /note="MAGE-C1"
ILFGISLREV

SEQ ID NO: 307 - protein, 9 aa, Artificial Sequence
  source: /note="Description of Artificial Sequence: Synthetic peptide"
  source: /note="MAGE-C1"
KVVEFLAML

SEQ ID NO: 308 - protein, 13 aa, Artificial Sequence
  source: /note="Description of Artificial Sequence: Synthetic peptide"
  source: /note="MAGE-C1"
SSALLSIFQSSPE

SEQ ID NO: 309 - protein, 9 aa, Artificial Sequence
  source: /note="Description of Artificial Sequence: Synthetic peptide"
  source: /note="MAGE-C1"
SFSYTLLSL

SEQ ID NO: 310 - protein, 9 aa, Artificial Sequence
  source: /note="Description of Artificial Sequence: Synthetic peptide"
  source: /note="MAGE-C1"
VSSFFSYTL

SEQ ID NO: 311 - protein, 10 aa, Artificial Sequence
  source: /note="Description of Artificial Sequence: Synthetic peptide"
  source: /note="MAGE-C2"
LLFGLALIEV

SEQ ID NO: 312 - protein, 9 aa, Artificial Sequence
  source: /note="Description of Artificial Sequence: Synthetic peptide"
  source: /note="MAGE-C2"
ALKDVEERV

SEQ ID NO: 313 - protein, 9 aa, Artificial Sequence
  source: /note="Description of Artificial Sequence: Synthetic peptide"
  source: /note="MAGE-C2"
SESIKKKVL

SEQ ID NO: 314 - protein, 9 aa, Artificial Sequence
  source: /note="Description of Artificial Sequence: Synthetic peptide"
  source: /note="MAGE-C2"
ASSTLYLVF

SEQ ID NO: 315 - protein, 15 aa, Artificial Sequence
  source: /note="Description of Artificial Sequence: Synthetic peptide"
  source: /note="MAGE-C2"
SSTLYLVFSPSSFST

SEQ ID NO: 316 - protein, 20 aa, Artificial Sequence
  source: /note="Description of Artificial Sequence: Synthetic peptide"
  source: /note="mucink"
PDTRPAPGSTAPPAHGVTSA

SEQ ID NO: 317 - protein, 9 aa, Artificial Sequence
  source: /note="Description of Artificial Sequence: Synthetic peptide"
  source: /note="NA88-A"
QGQHFLQKV

SEQ ID NO: 318 - protein, 9 aa, Artificial Sequence
  source: /note="Description of Artificial Sequence: Synthetic peptide"
  source: /note="NY-ESO-1 / LAGE-2"
SLLMWITQC

SEQ ID NO: 319 - protein, 11 aa, Artificial Sequence
  source: /note="Description of Artificial Sequence: Synthetic peptide"
  source: /note="NY-ESO-1 / LAGE-2"
MLMAQEALAFL

SEQ ID NO: 320 - protein, 11 aa, Artificial Sequence
  source: /note="Description of Artificial Sequence: Synthetic peptide"
  source: /note="NY-ESO-1 / LAGE-2"
YLAMPFATPME

SEQ ID NO: 321 - protein, 10 aa, Artificial Sequence
  source: /note="Description of Artificial Sequence: Synthetic peptide"
  source: /note="NY-ESO-1 / LAGE-2"
ASGPGGGAPR

SEQ ID NO: 322 - protein, 10 aa, Artificial Sequence
  source: /note="Description of Artificial Sequence: Synthetic peptide"
  source: /note="NY-ESO-1 / LAGE-2"
LAAQERRVPR

SEQ ID NO: 323 - protein, 10 aa, Artificial Sequence
  source: /note="Description of Artificial Sequence: Synthetic peptide"
  source: /note="NY-ESO-1 / LAGE-2"
TVSGNILTIR

SEQ ID NO: 324 - protein, 13 aa, Artificial Sequence
  source: /note="Description of Artificial Sequence: Synthetic peptide"
  source: /note="NY-ESO-1 / LAGE-2"
APRGPHGGAASGL

SEQ ID NO: 325 - protein, 11 aa, Artificial Sequence
  source: /note="Description of Artificial Sequence: Synthetic peptide"
  source: /note="NY-ESO-1 / LAGE-2"
MPFATPMEAEL

SEQ ID NO: 326 - protein, 12 aa, Artificial Sequence
  source: /note="Description of Artificial Sequence: Synthetic peptide"
  source: /note="NY-ESO-1 / LAGE-2"
KEFTVSGNILTI

SEQ ID NO: 327 - protein, 9 aa, Artificial Sequence
  source: /note="Description of Artificial Sequence: Synthetic peptide"
  source: /note="NY-ESO-1 / LAGE-2"
MPFATPMEA

SEQ ID NO: 328 - protein, 9 aa, Artificial Sequence
  source: /note="Description of Artificial Sequence: Synthetic peptide"
  source: /note="NY-ESO-1 / LAGE-2"
FATPMEAEL

SEQ ID NO: 329 - protein, 11 aa, Artificial Sequence
  source: /note="Description of Artificial Sequence: Synthetic peptide"
  source: /note="NY-ESO-1 / LAGE-2"
FATPMEAELAR

SEQ ID NO: 330 - protein, 9 aa, Artificial Sequence
  source: /note="Description of Artificial Sequence: Synthetic peptide"
  source: /note="NY-ESO-1 / LAGE-2"
LAMPFATPM

SEQ ID NO: 331 - protein, 9 aa, Artificial Sequence
  source: /note="Description of Artificial Sequence: Synthetic peptide"
  source: /note="NY-ESO-1 / LAGE-2"
ARGPESRLL

SEQ ID NO: 332 - protein, 14 aa, Artificial Sequence
  source: /note="Description of Artificial Sequence: Synthetic peptide"
  source: /note="NY-ESO-1 / LAGE-2"
SLLMWITQCFLPVF

SEQ ID NO: 333 - protein, 25 aa, Artificial Sequence
  source: /note="Description of Artificial Sequence: Synthetic peptide"
  source: /note="NY-ESO-1 / LAGE-2"
LLEFYLAMPFATPMEAELARRSLAQ

SEQ ID NO: 334 - protein, 12 aa, Artificial Sequence
  source: /note="Description of Artificial Sequence: Synthetic peptide"
  source: /note="NY-ESO-1 / LAGE-2"
EFYLAMPFATPM

SEQ ID NO: 335 - protein, 25 aa, Artificial Sequence
  source: /note="Description of Artificial Sequence: Synthetic peptide"
  source: /note="NY-ESO-1 / LAGE-2"
PGVLLKEFTVSGNILTIRLTAADHR

SEQ ID NO: 336 - protein, 12 aa, Artificial Sequence
  source: /note="Description of Artificial Sequence: Synthetic peptide"
  source: /note="NY-ESO-1 / LAGE-2"
RLLEFYLAMPFA

SEQ ID NO: 337 - protein, 20 aa, Artificial Sequence
  source: /note="Description of Artificial Sequence: Synthetic peptide"
  source: /note="NY-ESO-1 / LAGE-2"
QGAMLAAQERRVPRAAEVPR

SEQ ID NO: 338 - protein, 13 aa, Artificial Sequence
  source: /note="Description of Artificial Sequence: Synthetic peptide"
  source: /note="NY-ESO-1 / LAGE-2"
PFATPMEAELARR

SEQ ID NO: 339 - protein, 20 aa, Artificial Sequence
  source: /note="Description of Artificial Sequence: Synthetic peptide"
  source: /note="NY-ESO-1 / LAGE-2"
PGVLLKEFTVSGNILTIRLT

SEQ ID NO: 340 - protein, 10 aa, Artificial Sequence
  source: /note="Description of Artificial Sequence: Synthetic peptide"
  source: /note="NY-ESO-1 / LAGE-2"
VLLKEFTVSG

SEQ ID NO: 341 - protein, 18 aa, Artificial Sequence
  source: /note="Description of Artificial Sequence: Synthetic peptide"
  source: /note="NY-ESO-1 / LAGE-2"
AADHRQLQLSISSCLQQL

SEQ ID NO: 342 - protein, 25 aa, Artificial Sequence
  source: /note="Description of Artificial Sequence: Synthetic peptide"
  source: /note="NY-ESO-1 / LAGE-2"
LLEFYLAMPFATPMEAELARRSLAQ

SEQ ID NO: 343 - protein, 15 aa, Artificial Sequence
  source: /note="Description of Artificial Sequence: Synthetic peptide"
  source: /note="NY-ESO-1 / LAGE-2"
LKEFTVSGNILTIRL

SEQ ID NO: 344 - protein, 25 aa, Artificial Sequence
  source: /note="Description of Artificial Sequence: Synthetic peptide"
  source: /note="NY-ESO-1 / LAGE-2"
PGVLLKEFTVSGNILTIRLTAADHR

SEQ ID NO: 345 - protein, 11 aa, Artificial Sequence
  source: /note="Description of Artificial Sequence: Synthetic peptide"
  source: /note="NY-ESO-1 / LAGE-2"
KEFTVSGNILT

SEQ ID NO: 346 - protein, 14 aa, Artificial Sequence
  source: /note="Description of Artificial Sequence: Synthetic peptide"
  source: /note="NY-ESO-1 / LAGE-2"
LLEFYLAMPFATPM

SEQ ID NO: 347 - protein, 14 aa, Artificial Sequence
  source: /note="Description of Artificial Sequence: Synthetic peptide"
  source: /note="NY-ESO-1 / LAGE-2"
AGATGGRGPRGAGA

SEQ ID NO: 348 - protein, 9 aa, Artificial Sequence
  source: /note="Description of Artificial Sequence: Synthetic peptide"
  source: /note="SAGE"
LYATVIHDI

SEQ ID NO: 349 - protein, 9 aa, Artificial Sequence
  source: /note="Description of Artificial Sequence: Synthetic peptide"
  source: /note="Sp17"
ILDSSEEDK

SEQ ID NO: 350 - protein, 9 aa, Artificial Sequence
  source: /note="Description of Artificial Sequence: Synthetic peptide"
  source: /note="SSX-2"
KASEKIFYV

SEQ ID NO: 351 - protein, 16 aa, Artificial Sequence
  source: /note="Description of Artificial Sequence: Synthetic peptide"
  source: /note="SSX-2"
EKIQKAFDDIAKYFSK

SEQ ID NO: 352 - protein, 11 aa, Artificial Sequence
  source: /note="Description of Artificial Sequence: Synthetic peptide"
  source: /note="SSX-2"
FGRLQGISPKI

SEQ ID NO: 353 - protein, 18 aa, Artificial Sequence
  source: /note="Description of Artificial Sequence: Synthetic peptide"
  source: /note="SSX-2"
WEKMKASEKIFYVYMKRK

SEQ ID NO: 354 - protein, 15 aa, Artificial Sequence
  source: /note="Description of Artificial Sequence: Synthetic peptide"
  source: /note="SSX-2"
KIFYVYMKRKYEAMT

SEQ ID NO: 355 - protein, 14 aa, Artificial Sequence
  source: /note="Description of Artificial Sequence: Synthetic peptide"
  source: /note="SSX-2"
KIFYVYMKRKYEAM

SEQ ID NO: 356 - protein, 20 aa, Artificial Sequence
  source: /note="Description of Artificial Sequence: Synthetic peptide"
  source: /note="SSX-4"
INKTSGPKRGKHAWTHRLRE

SEQ ID NO: 357 - protein, 20 aa, Artificial Sequence
  source: /note="Description of Artificial Sequence: Synthetic peptide"
  source: /note="SSX-4"
YFSKKEWEKMKSSEKIVYVY

SEQ ID NO: 358 - protein, 20 aa, Artificial Sequence
  source: /note="Description of Artificial Sequence: Synthetic peptide"
  source: /note="SSX-4"
MKLNYEVMTKLGFKVTLPPF

SEQ ID NO: 359 - protein, 20 aa, Artificial Sequence
  source: /note="Description of Artificial Sequence: Synthetic peptide"
  source: /note="SSX-4"
KHAWTHRLRERKQLVVYEEI

SEQ ID NO: 360 - protein, 20 aa, Artificial Sequence
  source: /note="Description of Artificial Sequence: Synthetic peptide"
  source: /note="SSX-4"
LGFKVTLPPFMRSKRAADFH

SEQ ID NO: 361 - protein, 20 aa, Artificial Sequence
  source: /note="Description of Artificial Sequence: Synthetic peptide"
  source: /note="SSX-4"
KSSEKIVYVYMKLNYEVMTK

SEQ ID NO: 362 - protein, 20 aa, Artificial Sequence
  source: /note="Description of Artificial Sequence: Synthetic peptide"
  source: /note="SSX-4"
KHAWTHRLRERKQLVVYEEI

SEQ ID NO: 363 - protein, 9 aa, Artificial Sequence
  source: /note="Description of Artificial Sequence: Synthetic peptide"
  source: /note="TAG-1"
SLGWLFLLL

SEQ ID NO: 364 - protein, 9 aa, Artificial Sequence
  source: /note="Description of Artificial Sequence: Synthetic peptide"
  source: /note="TAG-1"
LSRLSNRLL

SEQ ID NO: 365 - protein, 15 aa, Artificial Sequence
  source: /note="Description of Artificial Sequence: Synthetic peptide"
  source: /note="TRAG-3"
CEFHACWPAFTVLGE

SEQ ID NO: 366 - protein, 15 aa, Artificial Sequence
  source: /note="Description of Artificial Sequence: Synthetic peptide"
  source: /note="TRAG-3"
CEFHACWPAFTVLGE

SEQ ID NO: 367 - protein, 10 aa, Artificial Sequence
  source: /note="Description of Artificial Sequence: Synthetic peptide"
  source: /note="TRP2-INT2g"
EVISCKLIKR

SEQ ID NO: 368 - protein, 9 aa, Artificial Sequence
  source: /note="Description of Artificial Sequence: Synthetic peptide"
  source: /note="XAGE-1b/GAGED2a"
RQKKIRIQL

SEQ ID NO: 369 - protein, 16 aa, Artificial Sequence
  source: /note="Description of Artificial Sequence: Synthetic peptide"
  source: /note="XAGE-1b/GAGED2a"
HLGSRQKKIRIQLRSQ

SEQ ID NO: 370 - protein, 17 aa, Artificial Sequence
  source: /note="Description of Artificial Sequence: Synthetic peptide"
  source: /note="XAGE-1b/GAGED2a"
CATWKVICKSCISQTPG

SEQ ID NO: 371 - protein, 10 aa, Artificial Sequence
  source: /note="Description of Artificial Sequence: Synthetic peptide"
  source: /note="CEA"
YLSGANLNLG

SEQ ID NO: 372 - protein, 9 aa, Artificial Sequence
  source: /note="Description of Artificial Sequence: Synthetic peptide"
  source: /note="CEA"
IMIGVLVGV

SEQ ID NO: 373 - protein, 9 aa, Artificial Sequence
  source: /note="Description of Artificial Sequence: Synthetic peptide"
  source: /note="CEA"
GVLVGVALI

SEQ ID NO: 374 - protein, 9 aa, Artificial Sequence
  source: /note="Description of Artificial Sequence: Synthetic peptide"
  source: /note="CEA"
HLFGYSWYK

SEQ ID NO: 375 - protein, 10 aa, Artificial Sequence
  source: /note="Description of Artificial Sequence: Synthetic peptide"
  source: /note="CEA"
QYSWFVNGTF

SEQ ID NO: 376 - protein, 9 aa, Artificial Sequence
  source: /note="Description of Artificial Sequence: Synthetic peptide"
  source: /note="CEA"
TYACFVSNL

SEQ ID NO: 377 - protein, 15 aa, Artificial Sequence
  source: /note="Description of Artificial Sequence: Synthetic peptide"
  source: /note="CEA"
AYVCGIQNSVSANRS

SEQ ID NO: 378 - protein, 25 aa, Artificial Sequence
  source: /note="Description of Artificial Sequence: Synthetic peptide"
  source: /note="CEA"
DTGFYTLHVIKSDLVNEEATGQFRV

SEQ ID NO: 379 - protein, 15 aa, Artificial Sequence
  source: /note="Description of Artificial Sequence: Synthetic peptide"
  source: /note="CEA"
YSWRINGIPQQHTQV

SEQ ID NO: 380 - protein, 13 aa, Artificial Sequence
  source: /note="Description of Artificial Sequence: Synthetic peptide"
  source: /note="CEA"
TYYRPGVNLSLSC

SEQ ID NO: 381 - protein, 13 aa, Artificial Sequence
  source: /note="Description of Artificial Sequence: Synthetic peptide"
  source: /note="CEA"
EIIYPNASLLIQN

SEQ ID NO: 382 - protein, 15 aa, Artificial Sequence
  source: /note="Description of Artificial Sequence: Synthetic peptide"
  source: /note="CEA"
YACFVSNLATGRNNS

SEQ ID NO: 383 - protein, 13 aa, Artificial Sequence
  source: /note="Description of Artificial Sequence: Synthetic peptide"
  source: /note="CEA"
LWWVNNQSLPVSP

SEQ ID NO: 384 - protein, 13 aa, Artificial Sequence
  source: /note="Description of Artificial Sequence: Synthetic peptide"
  source: /note="CEA"
EIIYPNASLLIQN

SEQ ID NO: 385 - protein, 13 aa, Artificial Sequence
  source: /note="Description of Artificial Sequence: Synthetic peptide"
  source: /note="CEA"
NSIVKSITVSASG

SEQ ID NO: 386 - protein, 9 aa, Artificial Sequence
  source: /note="Description of Artificial Sequence: Synthetic peptide"
  source: /note="gp100 / Pmel17"
KTWGQYWQV

SEQ ID NO: 387 - protein, 10 aa, Artificial Sequence
  source: /note="Description of Artificial Sequence: Synthetic peptide"
  source: /note="gp100 / Pmel17"
  VARIANT (1)..(1): /replace=" "
  MISC_FEATURE (1)..(10): /note="Variant residues given in the sequence have no preference with respect to those in the annotations for variant positions"
AMLGTHTMEV

SEQ ID NO: 388 - protein, 9 aa, Artificial Sequence
  source: /note="Description of Artificial Sequence: Synthetic peptide"
  source: /note="gp100 / Pmel17"
ITDQVPFSV

SEQ ID NO: 389 - protein, 9 aa, Artificial Sequence
  source: /note="Description of Artificial Sequence: Synthetic peptide"
  source: /note="gp100 / Pmel17"
YLEPGPVTA

SEQ ID NO: 390 - protein, 10 aa, Artificial Sequence
  source: /note="Description of Artificial Sequence: Synthetic peptide"
  source: /note="gp100 / Pmel17"
LLDGTATLRL

SEQ ID NO: 391 - protein, 10 aa, Artificial Sequence
  source: /note="Description of Artificial Sequence: Synthetic peptide"
  source: /note="gp100 / Pmel17"
VLYRYGSFSV

SEQ ID NO: 392 - protein, 10 aa, Artificial Sequence
  source: /note="Description of Artificial Sequence: Synthetic peptide"
  source: /note="gp100 / Pmel17"
SLADTNSLAV

SEQ ID NO: 393 - protein, 9 aa, Artificial Sequence
  source: /note="Description of Artificial Sequence: Synthetic peptide"
  source: /note="gp100 / Pmel17"
RLMKQDFSV

SEQ ID NO: 394 - protein, 9 aa, Artificial Sequence
  source: /note="Description of Artificial Sequence: Synthetic peptide"
  source: /note="gp100 / Pmel17"
RLPRIFCSC

SEQ ID NO: 395 - protein, 9 aa, Artificial Sequence
  source: /note="Description of Artificial Sequence: Synthetic peptide"
  source: /note="gp100 / Pmel17"
LIYRRRLMK

SEQ ID NO: 396 - protein, 9 aa, Artificial Sequence
  source: /note="Description of Artificial Sequence: Synthetic peptide"
  source: /note="gp100 / Pmel17"
ALLAVGATK

SEQ ID NO: 397 - protein, 10 aa, Artificial Sequence
  source: /note="Description of Artificial Sequence: Synthetic peptide"
  source: /note="gp100 / Pmel17"
IALNFPGSQK

SEQ ID NO: 398 - protein, 9 aa, Artificial Sequence
  source: /note="Description of Artificial Sequence: Synthetic peptide"
  source: /note="gp100 / Pmel17"
RSYVPLAHR

SEQ ID NO: 399 - protein, 9 aa, Artificial Sequence
  source: /note="Description of Artificial Sequence: Synthetic peptide"
  source: /note="gp100 / Pmel17"
ALNFPGSQK

SEQ ID NO: 400 - protein, 9 aa, Artificial Sequence
  source: /note="Description of Artificial Sequence: Synthetic peptide"
  source: /note="gp100 / Pmel17"
VYFFLPDHL

SEQ ID NO: 401 - protein, 9 aa, Artificial Sequence
  source: /note="Description of Artificial Sequence: Synthetic peptide"
  source: /note="gp100 / Pmel17"
RTKQLYPEW

SEQ ID NO: 402 - protein, 10 aa, Artificial Sequence
  source: /note="Description of Artificial Sequence: Synthetic peptide"
  source: /note="gp100 / Pmel17"
HTMEVTVYHR

SEQ ID NO: 403 - protein, 9 aa, Artificial Sequence
  source: /note="Description of Artificial Sequence: Synthetic peptide"
  source: /note="gp100 / Pmel17"
SSPGCQPPA

SEQ ID NO: 404 - protein, 10 aa, Artificial Sequence
  source: /note="Description of Artificial Sequence: Synthetic peptide"
  source: /note="gp100 / Pmel17"
VPLDCVLYRY

SEQ ID NO: 405 - protein, 9 aa, Artificial Sequence
  source: /note="Description of Artificial Sequence: Synthetic peptide"
  source: /note="gp100 / Pmel17"
LPHSSSHWL

SEQ ID NO: 406 - protein, 8 aa, Artificial Sequence
  source: /note="Description of Artificial Sequence: Synthetic peptide"
  source: /note="gp100 / Pmel17"
SNDGPTLI

SEQ ID NO: 407 - protein, 15 aa, Artificial Sequence
  source: /note="Description of Artificial Sequence: Synthetic peptide"
  source: /note="gp100 / Pmel17"
GRAMLGTHTMEVTVY

SEQ ID NO: 408 - protein, 16 aa, Artificial Sequence
  source: /note="Description of Artificial Sequence: Synthetic peptide"
  source: /note="gp100 / Pmel17"
WNRQLYPEWTEAQRLD

SEQ ID NO: 409 - protein, 18 aa, Artificial Sequence
  source: /note="Description of Artificial Sequence: Synthetic peptide"
  source: /note="gp100 / Pmel17"
TTEWVETTARELPIPEPE

SEQ ID NO: 410 - protein, 17 aa, Artificial Sequence
  source: /note="Description of Artificial Sequence: Synthetic peptide"
  source: /note="gp100 / Pmel17"
TGRAMLGTHTMEVTVYH

SEQ ID NO: 411 - protein, 9 aa, Artificial Sequence
  source: /note="Description of Artificial Sequence: Synthetic peptide"
  source: /note="mammaglobin-A"
PLLENVISK

SEQ ID NO: 412 - protein, 30 aa, Artificial Sequence
  source: /note="Description of Artificial Sequence: Synthetic polypeptide"
  source: /note="Melan-A / MART-1"
YTTAEEAAGIGILTVILGVLLLIGCWYCRR

SEQ ID NO: 413 - protein, 14 aa, Artificial Sequence
  source: /note="Description of Artificial Sequence: Synthetic peptide"
  source: /note="Melan-A / MART-1"
AAGIGILTVILGVL

SEQ ID NO: 414 - protein, 14 aa, Artificial Sequence
  source: /note="Description of Artificial Sequence: Synthetic peptide"
  source: /note="Melan-A / MART-1"
APPAYEKLPSAEQF

SEQ ID NO: 415 - protein, 23 aa, Artificial Sequence
  source: /note="Description of Artificial Sequence: Synthetic peptide"
  source: /note="Melan-A / MART-1"
RNGYRALMDKSLHVGTQCALTRR

SEQ ID NO: 416 - protein, 20 aa, Artificial Sequence
  source: /note="Description of Artificial Sequence: Synthetic peptide"
  source: /note="Melan-A / MART-1"
MPREDAHFIYGYPKKGHGHS

SEQ ID NO: 417 - protein, 20 aa, Artificial Sequence
  source: /note="Description of Artificial Sequence: Synthetic peptide"
  source: /note="Melan-A / MART-1"
KNCEPVVPNAPPAYEKLSAE

SEQ ID NO: 418 - protein, 9 aa, Artificial Sequence
  source: /note="Description of Artificial Sequence: Synthetic peptide"
  source: /note="NY-BR-1"
SLSKILDTV

SEQ ID NO: 419 - protein, 9 aa, Artificial Sequence
  source: /note="Description of Artificial Sequence: Synthetic peptide"
  source: /note="OA1"
LYSACFWWL

SEQ ID NO: 420 - protein, 9 aa, Artificial Sequence
  source: /note="Description of Artificial Sequence: Synthetic peptide"
  source: /note="PAP"
FLFLLFFWL

SEQ ID NO: 421 - protein, 9 aa, Artificial Sequence
  source: /note="Description of Artificial Sequence: Synthetic peptide"
  source: /note="PAP"
TLMSAMTNL

SEQ ID NO: 422 - protein, 9 aa, Artificial Sequence
  source: /note="Description of Artificial Sequence: Synthetic peptide"
  source: /note="PAP"
ALDVYNGLL

SEQ ID NO: 423 - protein, 10 aa, Artificial Sequence
  source: /note="Description of Artificial Sequence: Synthetic peptide"
  source: /note="PSA"
FLTPKKLQCV

SEQ ID NO: 424 - protein, 10 aa, Artificial Sequence
  source: /note="Description of Artificial Sequence: Synthetic peptide"
  source: /note="PSA"
VISNDVCAQV

SEQ ID NO: 425 - protein, 9 aa, Artificial Sequence
  source: /note="Description of Artificial Sequence: Synthetic peptide"
  source: /note="RAB38 / NY-MEL-1"
VLHWDPETV

SEQ ID NO: 426 - protein, 9 aa, Artificial Sequence
  source: /note="Description of Artificial Sequence: Synthetic peptide"
  source: /note="TRP-1 / gp75"
MSLQRQFLR

SEQ ID NO: 427 - protein, 21 aa, Artificial Sequence
  source: /note="Description of Artificial Sequence: Synthetic peptide"
  source: /note="TRP-1 / gp75"
ISPNSVFSQWRVVCDSLEDYD

SEQ ID NO: 428 - protein, 10 aa, Artificial Sequence
  source: /note="Description of Artificial Sequence: Synthetic peptide"
  source: /note="TRP-1 / gp75"
SLPYWNFATG

SEQ ID NO: 429 - protein, 15 aa, Artificial Sequence
  source: /note="Description of Artificial Sequence: Synthetic peptide"
  source: /note="TRP-1 / gp75"
SQWRVVCDSLEDYDT

SEQ ID NO: 430 - protein, 9 aa, Artificial Sequence
  source: /note="Description of Artificial Sequence: Synthetic peptide"
  source: /note="TRP-2"
SVYDFFVWL

SEQ ID NO: 431 - protein, 9 aa, Artificial Sequence
  source: /note="Description of Artificial Sequence: Synthetic peptide"
  source: /note="TRP-2"
TLDSQVMSL

SEQ ID NO: 432 - protein, 9 aa, Artificial Sequence
  source: /note="Description of Artificial Sequence: Synthetic peptide"
  source: /note="TRP-2"
LLGPGRPYR

SEQ ID NO: 433 - protein, 9 aa, Artificial Sequence
  source: /note="Description of Artificial Sequence: Synthetic peptide"
  source: /note="TRP-2"
ANDPIFVVL

SEQ ID NO: 434 - protein, 15 aa, Artificial Sequence
  source: /note="Description of Artificial Sequence: Synthetic peptide"
  source: /note="TRP-2"
QCTEVRADTRPWSGP

SEQ ID NO: 435 - protein, 10 aa, Artificial Sequence
  source: /note="Description of Artificial Sequence: Synthetic peptide"
  source: /note="TRP-2"
ALPYWNFATG

SEQ ID NO: 436 - protein, 9 aa, Artificial Sequence
  source: /note="Description of Artificial Sequence: Synthetic peptide"
  source: /note="tyrosinase"
KCDICTDEY

SEQ ID NO: 437 - protein, 11 aa, Artificial Sequence
  source: /note="Description of Artificial Sequence: Synthetic peptide"
  source: /note="tyrosinase"
SSDYVIPIGTY

SEQ ID NO: 438 - protein, 9 aa, Artificial Sequence
  source: /note="Description of Artificial Sequence: Synthetic peptide"
  source: /note="tyrosinase"
MLLAVLYCL

SEQ ID NO: 439 - protein, 10 aa, Artificial Sequence
  source: /note="Description of Artificial Sequence: Synthetic peptide"
  source: /note="tyrosinase"
CLLWSFQTSA

SEQ ID NO: 440 - protein, 9 aa, Artificial Sequence
  source: /note="Description of Artificial Sequence: Synthetic peptide"
  source: /note="tyrosinase"
YMDGTMSQV

SEQ ID NO: 441 - protein, 9 aa, Artificial Sequence
  source: /note="Description of Artificial Sequence: Synthetic peptide"
  source: /note="tyrosinase"
AFLPWHRLF

SEQ ID NO: 442 - protein, 11 aa, Artificial Sequence
  source: /note="Description of Artificial Sequence: Synthetic peptide"
  source: /note="tyrosinase"
IYMDGTADFSF

SEQ ID NO: 443 - protein, 9 aa, Artificial Sequence
  source: /note="Description of Artificial Sequence: Synthetic peptide"
  source: /note="tyrosinase"
QCSGNFMGF

SEQ ID NO: 444 - protein, 12 aa, Artificial Sequence
  source: /note="Description of Artificial Sequence: Synthetic peptide"
  source: /note="tyrosinase"
TPRLPSSADVEF

SEQ ID NO: 445 - protein, 9 aa, Artificial Sequence
  source: /note="Description of Artificial Sequence: Synthetic peptide"
  source: /note="tyrosinase"
LPSSADVEF

SEQ ID NO: 446 - protein, 10 aa, Artificial Sequence
  source: /note="Description of Artificial Sequence: Synthetic peptide"
  source: /note="tyrosinase"
LHHAFVDSIF

SEQ ID NO: 447 - protein, 10 aa, Artificial Sequence
  source: /note="Description of Artificial Sequence: Synthetic peptide"
  source: /note="tyrosinase"
SEIWRDIDFD

SEQ ID NO: 448 - protein, 15 aa, Artificial Sequence
  source: /note="Description of Artificial Sequence: Synthetic peptide"
  source: /note="tyrosinase"
QNILLSNAPLGPQFP

SEQ ID NO: 449 - protein, 13 aa, Artificial Sequence
  source: /note="Description of Artificial Sequence: Synthetic peptide"
  source: /note="tyrosinase"
SYLQDSDPDSFQD

SEQ ID NO: 450 - protein, 21 aa, Artificial Sequence [sequence omitted]

SEQ ID NO: 451 - protein, 9 aa, Artificial Sequence
  source: /note="Description of Artificial Sequence: Synthetic peptide"
  source: /note="adipophilin"
SVASTITGV

SEQ ID NO: 452 - protein, 10 aa, Artificial Sequence
  source: /note="Description of Artificial Sequence: Synthetic peptide"
  source: /note="AIM-2"
RSDSGQQARY

SEQ ID NO: 453 - protein, 9 aa, Artificial Sequence
  source: /note="Description of Artificial Sequence: Synthetic peptide"
  source: /note="ALDH1A1"
LLYKLADLI

SEQ ID NO: 454 - protein, 10 aa, Artificial Sequence
  source: /note="Description of Artificial Sequence: Synthetic peptide"
  source: /note="BCLX(L)"
YLNDHLEPWI

SEQ ID NO: 455 - protein, 9 aa, Artificial Sequence
  source: /note="Description of Artificial Sequence: Synthetic peptide"
  source: /note="BING-4"
CQWGRLWQL

SEQ ID NO: 456 - protein, 10 aa, Artificial Sequence
  source: /note="Description of Artificial Sequence: Synthetic peptide"
  source: /note="CALCA"
VLLQAGSLHA

SEQ ID NO: 457 - protein, 9 aa, Artificial Sequence
  source: /note="Description of Artificial Sequence: Synthetic peptide"
  source: /note="CD45"
KFLDALISL

SEQ ID NO: 458 - protein, 9 aa, Artificial Sequence
  source: /note="Description of Artificial Sequence: Synthetic peptide"
  source: /note="CD274"
LLNAFTVTV

SEQ ID NO: 459 - protein, 9 aa, Artificial Sequence
  source: /note="Description of Artificial Sequence: Synthetic peptide"
  source: /note="CPSF"
KVHPVIWSL

SEQ ID NO: 460 - protein, 10 aa, Artificial Sequence
  source: /note="Description of Artificial Sequence: Synthetic peptide"
  source: /note="peptide"
LMLQNALTTM

SEQ ID NO: 461 - protein, 9 aa, Artificial Sequence
  source: /note="Description of Artificial Sequence: Synthetic peptide"
  source: /note="cyclinD1"
LLGATCMFV

SEQ ID NO: 462 - protein, 15 aa, Artificial Sequence
  source: /note="Description of Artificial Sequence: Synthetic peptide"
  source: /note="peptide"
NPPSMVAAGSVVAAV

SEQ ID NO: 463 - protein, 10 aa, Artificial Sequence
  source: /note="Description of Artificial Sequence: Synthetic peptide"
  source: /note="DKK1"
ALGGHPLLGV

SEQ ID NO: 464 - protein, 9 aa, Artificial Sequence
  source: /note="Description of Artificial Sequence: Synthetic peptide"
  source: /note="ENAH(hMena)"
TMNGSKSPV

SEQ ID NO: 465 - protein, 9 aa, Artificial Sequence
  source: /note="Description of Artificial Sequence: Synthetic peptide"
  source: /note="EpCAM"
RYQLDPKFI

SEQ ID NO: 466 - protein, 12 aa, Artificial Sequence
  source: /note="Description of Artificial Sequence: Synthetic peptide"
  source: /note="EphA3"
DVTFNIICKKCG

SEQ ID NO: 467 - protein, 9 aa, Artificial Sequence
  source: /note="Description of Artificial Sequence: Synthetic peptide"
  source: /note="EZH2"
FMVEDETVL

SEQ ID NO: 468 - protein, 10 aa, Artificial Sequence
  source: /note="Description of Artificial Sequence: Synthetic peptide"
  source: /note="FGF5"
NTYASPRFKF

SEQ ID NO: 469 - protein, 9 aa, Artificial Sequence
  source: /note="Description of Artificial Sequence: Synthetic peptide"
  source: /note="glypican-3"
FVGEFFTDV

SEQ ID NO: 470 - protein, 9 aa, Artificial Sequence
  source: /note="Description of Artificial Sequence: Synthetic peptide"
  source: /note="G250 / MN / CAIX"
HLSTAFARV

SEQ ID NO: 471 - protein, 9 aa, Artificial Sequence
  source: /note="Description of Artificial Sequence: Synthetic peptide"
  source: /note="HER-2 / neu"
KIFGSLAFL

SEQ ID NO: 472 - protein, 9 aa, Artificial Sequence
  source: /note="Description of Artificial Sequence: Synthetic peptide"
  source: /note="HER-2 / neu"
IISAVVGIL

SEQ ID NO: 473 - protein, 9 aa, Artificial Sequence
  source: /note="Description of Artificial Sequence: Synthetic peptide"
  source: /note="HER-2 / neu"
ALCRWGLLL

SEQ ID NO: 474 - protein, 9 aa, Artificial Sequence
  source: /note="Description of Artificial Sequence: Synthetic peptide"
  source: /note="HER-2 / neu"
ILHNGAYSL

SEQ ID NO: 475 - protein, 9 aa, Artificial Sequence
  source: /note="Description of Artificial Sequence: Synthetic peptide"
  source: /note="HER-2 / neu"
RLLQETELV

SEQ ID NO: 476 - protein, 9 aa, Artificial Sequence
  source: /note="Description of Artificial Sequence: Synthetic peptide"
  source: /note="HER-2 / neu"
VVLGVVFGI

SEQ ID NO: 477 - protein, 10 aa, Artificial Sequence
  source: /note="Description of Artificial Sequence: Synthetic peptide"
  source: /note="HER-2 / neu"
YMIMVKCWMI

SEQ ID NO: 478 - protein, 9 aa, Artificial Sequence
  source: /note="Description of Artificial Sequence: Synthetic peptide"
  source: /note="HER-2 / neu"
HLYQGCQVV

SEQ ID NO: 479 - protein, 10 aa, Artificial Sequence
  source: /note="Description of Artificial Sequence: Synthetic peptide"
  source: /note="HER-2 / neu"
YLVPQQGFFC

SEQ ID NO: 480 - protein, 9 aa, Artificial Sequence
  source: /note="Description of Artificial Sequence: Synthetic peptide"
  source: /note="HER-2 / neu"
PLQPEQLQV

SEQ ID NO: 481 - protein, 9 aa, Artificial Sequence
  source: /note="Description of Artificial Sequence: Synthetic peptide"
  source: /note="HER-2 / neu"
TLEEITGYL

SEQ ID NO: 482 - protein, 9 aa, Artificial Sequence
  source: /note="Description of Artificial Sequence: Synthetic peptide"
  source: /note="HER-2 / neu"
ALIHHNTHL

SEQ ID NO: 483 - protein, 9 aa, Artificial Sequence
  source: /note="Description of Artificial Sequence: Synthetic peptide"
  source: /note="HER-2 / neu"
PLTSIISAV

SEQ ID NO: 484 - protein, 9 aa, Artificial Sequence
  source: /note="Description of Artificial Sequence: Synthetic peptide"
  source: /note="HER-2 / neu"
VLRENTSPK

SEQ ID NO: 485 - protein, 9 aa, Artificial Sequence
  source: /note="Description of Artificial Sequence: Synthetic peptide"
  source: /note="HER-2 / neu"
TYLPTNASL

SEQ ID NO: 486 - protein, 9 aa, Artificial Sequence
  source: /note="Description of Artificial Sequence: Synthetic peptide"
  source: /note="HLA-DOB"
FLLGLIFLL

SEQ ID NO: 487 - protein, 9 aa, Artificial Sequence
  source: /note="Description of Artificial Sequence: Synthetic peptide"
  source: /note="Hepsin"
SLLSGDWVL

SEQ ID NO: 488 - protein, 9 aa, Artificial Sequence
  source: /note="Description of Artificial Sequence: Synthetic peptide"
  source: /note="Hepsin"
GLQLGVQAV

SEQ ID NO: 489 - protein, 9 aa, Artificial Sequence
  source: /note="Description of Artificial Sequence: Synthetic peptide"
  source: /note="Hepsin"
PLTEYIQPV

SEQ ID NO: 490 - protein, 9 aa, Artificial Sequence
  source: /note="Description of Artificial Sequence: Synthetic peptide"
  source: /note="IDO1"
ALLEIASCL

SEQ ID NO: 491 - protein, 9 aa, Artificial Sequence
  source: /note="Description of Artificial Sequence: Synthetic peptide"
  source: /note="IGF2B3"
NLSSAEVVV

SEQ ID NO: 492 - protein, 9 aa, Artificial Sequence
  source: /note="Description of Artificial Sequence: Synthetic peptide"
  source: /note="IGF2B3"
RLLVPTQFV

SEQ ID NO: 493 - protein, 9 aa, Artificial Sequence
  source: /note="Description of Artificial Sequence: Synthetic peptide"
  source: /note="IL13Ralpha2"
WLPFGFILI

SEQ ID NO: 494 - protein, 9 aa, Artificial Sequence
  source: /note="Description of Artificial Sequence: Synthetic peptide"
  source: /note="Intestinal carboxyl esterase"
SPRWWPTCL

SEQ ID NO: 495 - protein, 9 aa, Artificial Sequence
  source: /note="Description of Artificial Sequence: Synthetic peptide"
  source: /note="alpha-foetoprotein"
GVALQTMKQ

SEQ ID NO: 496 - protein, 9 aa, Artificial Sequence
  source: /note="Description of Artificial Sequence: Synthetic peptide"
  source: /note="alpha-foetoprotein"
FMNKFIYEI

SEQ ID NO: 497 - protein, 10 aa, Artificial Sequence
  source: /note="Description of Artificial Sequence: Synthetic peptide"
  source: /note="alpha-foetoprotein"
QLAVSVILRV

SEQ ID NO: 498 - protein, 9 aa, Artificial Sequence
  source: /note="Description of Artificial Sequence: Synthetic peptide"
  source: /note="Kallikrein 4"
FLGYLILGV

SEQ ID NO: 499 - protein, 15 aa, Artificial Sequence
  source: /note="Description of Artificial Sequence: Synthetic peptide"
  source: /note="Kallikrein 4"
SVSESDTIRSISIAS

SEQ ID NO: 500 - protein, 15 aa, Artificial Sequence
  source: /note="Description of Artificial Sequence: Synthetic peptide"
  source: /note="Kallikrein 4"
LLANGRMPTVLQCVN

SEQ ID NO: 501 - protein, 15 aa, Artificial Sequence
  source: /note="Description of Artificial Sequence: Synthetic peptide"
  source: /note="Kallikrein 4"
RMPTVLQCVNVSVVS

SEQ ID NO: 502 - protein, 9 aa, Artificial Sequence
  source: /note="Description of Artificial Sequence: Synthetic peptide"
  source: /note="KIF20A"
LLSDDDVVV

SEQ ID NO: 503 - protein, 10 aa, Artificial Sequence
  source: /note="Description of Artificial Sequence: Synthetic peptide"
  source: /note="KIF20A"
AQPDTAPLPV

SEQ ID NO: 504 - protein, 9 aa, Artificial Sequence
  source: /note="Description of Artificial Sequence: Synthetic peptide"
  source: /note="KIF20A"
CIAEQYHTV

SEQ ID NO: 505 - protein, 10 aa, Artificial Sequence
  source: /note="Description of Artificial Sequence: Synthetic peptide"
  source: /note="Lengsin"
FLPEFGISSA

SEQ ID NO: 506 - protein, 14 aa, Artificial Sequence
  source: /note="Description of Artificial Sequence: Synthetic peptide"
  source: /note="M-CSF"
LPAVVGLSPGEQEY

SEQ ID NO: 507 - protein, 16 aa, Artificial Sequence
  source: /note="Description of Artificial Sequence: Synthetic peptide"
  source: /note="MCSP"
VGQDVSVLFRVTGALQ

SEQ ID NO: 508 - protein, 8 aa, Artificial Sequence
  source: /note="Description of Artificial Sequence: Synthetic peptide"
  source: /note="mdm-2"
VLFYLGQY

SEQ ID NO: 509 - protein, 9 aa, Artificial Sequence
  source: /note="Description of Artificial Sequence: Synthetic peptide"
  source: /note="Meloe"
TLNDECWPA

SEQ ID NO: 510 - protein, 14 aa, Artificial Sequence
  source: /note="Description of Artificial Sequence: Synthetic peptide"
  source: /note="Meloe"
ERISSTLNDECWPA

SEQ ID NO: 511 - protein, 11 aa, Artificial Sequence
  source: /note="Description of Artificial Sequence: Synthetic peptide"
  source: /note="Meloe"
FGRLQGISPKI

SEQ ID NO: 512 - protein, 13 aa, Artificial Sequence
  source: /note="Description of Artificial Sequence: Synthetic peptide"
  source: /note="Meloe"
TSREQFLPSEGAA

SEQ ID NO: 513 - protein, 14 aa, Artificial Sequence
  source: /note="Description of Artificial Sequence: Synthetic peptide"
  source: /note="Meloe"
CPPWHPSERISSTL

SEQ ID NO: 514 - protein, 9 aa, Artificial Sequence
  source: /note="Description of Artificial Sequence: Synthetic peptide"
  source: /note="Midkine"
ALLALTSAV

SEQ ID NO: 515 - protein, 9 aa, Artificial Sequence
  source: /note="Description of Artificial Sequence: Synthetic peptide"
  source: /note="Midkine"
AQCQETIRV

SEQ ID NO: 516 - protein, 15 aa, Artificial Sequence
  source: /note="Description of Artificial Sequence: Synthetic peptide"
  source: /note="Midkine"
LTLLALLALTSAVAK

SEQ ID NO: 517 - protein, 10 aa, Artificial Sequence
  source: /note="Description of Artificial Sequence: Synthetic peptide"
  source: /note="MMP-2"
GLPPDVQRVH

SEQ ID NO: 518 - protein, 12 aa, Artificial Sequence
  source: /note="Description of Artificial Sequence: Synthetic peptide"
  source: /note="MMP-7"
SLFPNSPKWTSK

SEQ ID NO: 519 - protein, 9 aa, Artificial Sequence
  source: /note="Description of Artificial Sequence: Synthetic peptide"
  source: /note="MUC1"
STAPPVHNV

SEQ ID NO: 520 - protein, 9 aa, Artificial Sequence
  source: /note="Description of Artificial Sequence: Synthetic peptide"
  source: /note="MUC1"
LLLLTVLTV

SEQ ID NO: 521 - protein, 12 aa, Artificial Sequence
  source: /note="Description of Artificial Sequence: Synthetic peptide"
  source: /note="MUC1"
PGSTAPPAHGVT

SEQ ID NO: 522 - protein, 9 aa, Artificial Sequence
  source: /note="Description of Artificial Sequence: Synthetic peptide"
  source: /note="MUC5AC"
TCQPTCRSL

SEQ ID NO: 523 - protein, 9 aa, Artificial Sequence
  source: /note="Description of Artificial Sequence: Synthetic peptide"
  source: /note="p53"
LLGRNSFEV

SEQ ID NO: 524 - protein, 9 aa, Artificial Sequence
  source: /note="Description of Artificial Sequence: Synthetic peptide"
  source: /note="p53"
RMPEAAPPV

SEQ ID NO: 525 - protein, 9 aa, Artificial Sequence
  source: /note="Description of Artificial Sequence: Synthetic peptide"
  source: /note="p53"
SQKTYQGSY

SEQ ID NO: 526 - protein, 13 aa, Artificial Sequence
  source: /note="Description of Artificial Sequence: Synthetic peptide"
  source: /note="p53"
PGTRVRAMAIYKQ

SEQ ID NO: 527 - protein, 12 aa, Artificial Sequence
  source: /note="Description of Artificial Sequence: Synthetic peptide"
  source: /note="p53"
HLIRVEGNLRVE

SEQ ID NO: 528 - protein, 9 aa, Artificial Sequence
  source: /note="Description of Artificial Sequence: Synthetic peptide"
  source: /note="PAX5"
TLPGYPPHV

SEQ ID NO: 529 - protein, 12 aa, Artificial Sequence
  source: /note="Description of Artificial Sequence: Synthetic peptide"
  source: /note="PBF"
CTACRWKKACQR

SEQ ID NO: 530 - protein, 9 aa, Artificial Sequence
  source: /note="Description of Artificial Sequence: Synthetic peptide"
  source: /note="PRAME"
VLDGLDVLL

SEQ ID NO: 531 - protein, 10 aa, Artificial Sequence
  source: /note="Description of Artificial Sequence: Synthetic peptide"
  source: /note="PRAME"
SLYSFPEPEA

SEQ ID NO: 532 - protein, 10 aa, Artificial Sequence
  source: /note="Description of Artificial Sequence: Synthetic peptide"
  source: /note="PRAME"
ALYVDSLFFL

SEQ ID NO: 533 - protein, 9 aa, Artificial Sequence
  source: /note="Description of Artificial Sequence: Synthetic peptide"
  source: /note="PRAME"
SLLQHLIGL

SEQ ID NO: 534 - protein, 10 aa, Artificial Sequence
  source: /note="Description of Artificial Sequence: Synthetic peptide"
  source: /note="PRAME"
LYVDSLFFLC

SEQ ID NO: 535 - protein, 9 aa, Artificial Sequence
  source: /note="Description of Artificial Sequence: Synthetic peptide"
  source: /note="PSMA"
NYARTEDFF

SEQ ID NO: 536 - protein, 9 aa, Artificial Sequence
  source: /note="Description of Artificial Sequence: Synthetic peptide"
  source: /note="RAGE-1"
LKLSGVVRL

SEQ ID NO: 537 - protein, 11 aa, Artificial Sequence
  source: /note="Description of Artificial Sequence: Synthetic peptide"
  source: /note="RAGE-1"
PLPPARNGGLG

SEQ ID NO: 538 - protein, 10 aa, Artificial Sequence
  source: /note="Description of Artificial Sequence: Synthetic peptide"
  source: /note="RAGE-1"
SPSSNRIRNT

SEQ ID NO: 539 - protein, 9 aa, Artificial Sequence
  source: /note="Description of Artificial Sequence: Synthetic peptide"
  source: /note="RGS5"
LAALPHSCL

SEQ ID NO: 540 - protein, 10 aa, Artificial Sequence
  source: /note="Description of Artificial Sequence: Synthetic peptide"
  source: /note="RGS5"
GLASFKSFLK

SEQ ID NO: 541 - protein, 10 aa, Artificial Sequence
  source: /note="Description of Artificial Sequence: Synthetic peptide"
  source: /note="RhoC"
RAGLQVRKNK

SEQ ID NO: 542 - protein, 10 aa, Artificial Sequence
  source: /note="Description of Artificial Sequence: Synthetic peptide"
  source: /note="RNF43"
  VARIANT (10)..(10): /replace=" "
  MISC_FEATURE (1)..(10): /note="Variant residues given in the sequence have no preference with respect to those in the annotations for variant positions"
ALWPWLLMAT

SEQ ID NO: 543 - protein, 9 aa, Artificial Sequence
  source: /note="Description of Artificial Sequence: Synthetic peptide"
  source: /note="RNF43"
NSQPVWLCL

SEQ ID NO: 544 - protein, 9 aa, Artificial Sequence
  source: /note="Description of Artificial Sequence: Synthetic peptide"
  source: /note="RU2AS"
LPRWPPPQL

SEQ ID NO: 545 - protein, 9 aa, Artificial Sequence
  source: /note="Description of Artificial Sequence: Synthetic peptide"
  source: /note="secernin1"
KMDAEHPEL

SEQ ID NO: 546 - protein, 9 aa, Artificial Sequence
  source: /note="Description of Artificial Sequence: Synthetic peptide"
  source: /note="SOX10"
AWISKPPGV

SEQ ID NO: 547 - protein, 10 aa, Artificial Sequence
  source: /note="Description of Artificial Sequence: Synthetic peptide"
  source: /note="SOX10"
SAWISKPPGV

SEQ ID NO: 548 - protein, 9 aa, Artificial Sequence
  source: /note="Description of Artificial Sequence: Synthetic peptide"
  source: /note="STEAP1"
MIAVFLPIV

SEQ ID NO: 549 - protein, 15 aa, Artificial Sequence
  source: /note="Description of Artificial Sequence: Synthetic peptide"
  source: /note="STEAP1"
HQQYFYKIPILVINK

SEQ ID NO: 550 - protein, 10 aa, Artificial Sequence
  source: /note="Description of Artificial Sequence: Synthetic peptide"
  source: /note="survivin"
ELTLGEFLKL

SEQ ID NO: 551 - protein, 15 aa, Artificial Sequence
  source: /note="Description of Artificial Sequence: Synthetic peptide"
  source: /note="survivin"
TLGEFLKLDRERAKN

SEQ ID NO: 552 - protein, 10 aa, Artificial Sequence
  source: /note="Description of Artificial Sequence: Synthetic peptide"
  source: /note="Telomerase"
ILAKFLHWLE

SEQ ID NO: 553 - protein, 9 aa, Artificial Sequence
  source: /note="Description of Artificial Sequence: Synthetic peptide"
  source: /note="Telomerase"
RLVDDFLLV

SEQ ID NO: 554 - protein, 15 aa, Artificial Sequence
  source: /note="Description of Artificial Sequence: Synthetic peptide"
  source: /note="Telomerase"
RPGLLGASVLGLDDI

SEQ ID NO: 555 - protein, 15 aa, Artificial Sequence
  source: /note="Description of Artificial Sequence: Synthetic peptide"
  source: /note="Telomerase"
LTDLQPYMRQFVAHL

SEQ ID NO: 556 - protein, 9 aa, Artificial Sequence
  source: /note="Description of Artificial Sequence: Synthetic peptide"
  source: /note="TPBG"
RLARLALVL

SEQ ID NO: 557 - protein, 9 aa, Artificial Sequence
  source: /note="Description of Artificial Sequence: Synthetic peptide"
  source: /note="VEGF"
SRFGGAVVR

SEQ ID NO: 558 - protein, 11 aa, Artificial Sequence
  source: /note="Description of Artificial Sequence: Synthetic peptide"
  source: /note="WT1"
TSEKRPFMCAY

SEQ ID NO: 559 - protein, 9 aa, Artificial Sequence
  source: /note="Description of Artificial Sequence: Synthetic peptide"
  source: /note="WT1"
CMTWNQMNL

SEQ ID NO: 560 - protein, 11 aa, Artificial Sequence
  source: /note="Description of Artificial Sequence: Synthetic peptide"
  source: /note="WT1"
LSHLQMHSRKH

SEQ ID NO: 561 - protein, 16 aa, Artificial Sequence
  source: /note="Description of Artificial Sequence: Synthetic peptide"
  source: /note="WT1"
KRYFKLSHLQMHSRKH

SEQ ID NO: 562 - protein, 504 aa, Artificial Sequence
  source: /note="Description of Artificial Sequence: Synthetic polypeptide"
  source: /note="single chain variable fragment fusion protein"
DIQLTQSPASLAVSLGQRATISCKASQSVDYDGDSYLNWYQQIPGQPPKLLIYDASNLVSGIPPRFSGSGSGTDFTLNIHPVEKVDAATYHCQQSTEDPWTFGGGTKLEIKGGGGSGGGGSGGGGSQVQLQQSGAELVRPGSSVKISCKASGYAFSSYWMNWVKQRPGQGLEWIGQIWPGDGDTNYNGKFKGKATLTADESSSTAYMQLSSLASEDSAVYFCARRETTTVGRYYYAMDYWGQGTTVTVSSGGGGSDIKLQQSGAELARPGASVKMSCKTSGYTFTRYTMHWVKQRPGQGLEWIGYINPSRGYTNYNQKFKDKATLTTDKSSSTAYMQLSSLTSEDSAVYYCARYYDDHYCLDYWGQGTTLTVSSVEGGSGGSGGSGGSGGVDDIQLTQSPAIMSASPGEKVTMTCRASSSVSYMNWYQQKSGTSPKRWIYDTSKVASGVPYRFSGSGSGTSYSLTISSMEAEDAATYYCQQWSSNPLTFGAGTKLELKHHHHHH

SEQ ID NO: 563 - DNA, 290 bp, Artificial Sequence
  source: /note="Description of Artificial Sequence: Synthetic polynucleotide"
  source: /note="FNR Responsive Promoter"
gtcagcataacaccctgacctctcattaattgttcatgccgggcggcactatcgtcgtccggccttttcctctcttactctgctacgtacatctatttctataaatccgttcaatttgtctgttttttgcacaaacatgaaatatcagacaattccgtgacttaagaaaatttatacaaatcagcaatataccccttaaggagtatataaaggtgaatttgatttacatcaataagcggggttgctgaatcgttaaggtaggcggtaatagaaaagaaatcgaggcaaaa

SEQ ID NO: 564 - DNA, 173 bp, Artificial Sequence
  source: /note="Description of Artificial Sequence: Synthetic polynucleotide"
  source: /note="FNR Responsive Promoter"
atttcctctcatcccatccggggtgagagtcttttcccccgacttatggctcatgcatgcatcaaaaaagatgtgagcttgatcaaaaacaaaaaatatttcactcgacaggagtatttatattgcgcccgttacgtgggcttcgactgtaaatcagaaaggagaaaacacct

SEQ ID NO: 565 - DNA, 305 bp, Artificial Sequence
  source: /note="Description of Artificial Sequence: Synthetic polynucleotide"
  source: /note="FNR Responsive Promoter"
gtcagcataacaccctgacctctcattaattgttcatgccgggcggcactatcgtcgtccggccttttcctctcttactctgctacgtacatctatttctataaatccgttcaatttgtctgttttttgcacaaacatgaaatatcagacaattccgtgacttaagaaaatttatacaaatcagcaatataccccttaaggagtatataaaggtgaatttgatttacatcaataagcggggttgctgaatcgttaaggatccctctagaaataattttgtttaactttaagaaggagatatacat

SEQ ID NO: 566 - DNA, 180 bp, Artificial Sequence
  source: /note="Description of Artificial Sequence: Synthetic polynucleotide"
  source: /note="FNR Responsive Promoter"
catttcctctcatcccatccggggtgagagtcttttcccccgacttatggctcatgcatgcatcaaaaaagatgtgagcttgatcaaaaacaaaaaatatttcactcgacaggagtatttatattgcgcccggatccctctagaaataattttgtttaactttaagaaggagatatacat

SEQ ID NO: 567 - DNA, 199 bp, Artificial Sequence
  source: /note="Description of Artificial Sequence: Synthetic polynucleotide"
  source: /note="FNR Responsive Promoter"
agttgttcttattggtggtgttgctttatggttgcatcgtagtaaatggttgtaacaaaagcaatttttccggctgtctgtatacaaaaacgccgtaaagtttgagcgaagtcaataaactctctacccattcagggcaatatctctcttggatccctctagaaataattttgtttaactttaagaaggagatatacat

SEQ ID NO: 568 - DNA, 117 bp, Artificial Sequence
  source: /note="Description of Artificial Sequence: Synthetic polynucleotide"
  source: /note="FNR-responsive regulatory region"
atccccatcactcttgatggagatcaattccccaagctgctagagcgttaccttgcccttaaacattagcaatgtcgatttatcagagggccgacaggctcccacaggagaaaaccg

SEQ ID NO: 569 - DNA, 108 bp, Artificial Sequence
  source: /note="Description of Artificial Sequence: Synthetic polynucleotide"
  source: /note="FNR-responsive regulatory region"
ctcttgatcgttatcaattcccacgctgtttcagagcgttaccttgcccttaaacattagcaatgtcgatttatcagagggccgacaggctcccacaggagaaaaccg

SEQ ID NO: 570 - DNA, 290 bp, Artificial Sequence; identical to SEQ ID NO: 563
  source: /note="Description of Artificial Sequence: Synthetic polynucleotide"
  source: /note="nirB1 , FNR-responsive regulatory region"

SEQ ID NO: 571 - DNA, 433 bp, Artificial Sequence
  source: /note="Description of Artificial Sequence: Synthetic polynucleotide"
  source: /note="nirB2 , FNR-responsive regulatory region"
cggcccgatcgttgaacatagcggtccgcaggcggcactgcttacagcaaacggtctgtacgctgtcgtctttgtgatgtgcttcctgttaggtttcgtcagccgtcaccgtcagcataacaccctgacctctcattaattgctcatgccggacggcactatcgtcgtccggccttttcctctcttcccccgctacgtgcatctatttctataaacccgctcattttgtctattttttgcacaaacatgaaatatcagacaattccgtgacttaagaaaatttatacaaatcagcaatatacccattaaggagtatataaaggtgaatttgatttacatcaataagcggggttgctgaatcgttaaggtaggcggtaatagaaaagaaatcgaggcaaaaatgtttgtttaactttaagaaggagatatacat

SEQ ID NO: 572 - DNA, 290 bp, Artificial Sequence
  source: /note="Description of Artificial Sequence: Synthetic polynucleotide"
  source: /note="nirB3 , FNR-responsive regulatory region"
gtcagcataacaccctgacctctcattaattgctcatgccggacggcactatcgtcgtccggccttttcctctcttcccccgctacgtgcatctatttctataaacccgctcattttgtctattttttgcacaaacatgaaatatcagacaattccgtgacttaagaaaatttatacaaatcagcaatatacccattaaggagtatataaaggtgaatttgatttacatcaataagcggggttgctgaatcgttaaggtaggcggtaatagaaaagaaatcgaggcaaaa

SEQ ID NO: 573 - DNA, 173 bp, Artificial Sequence; identical to SEQ ID NO: 564
  source: /note="Description of Artificial Sequence: Synthetic polynucleotide"
  source: /note="ydfZ , FNR-responsive regulatory region"

SEQ ID NO: 574 - DNA, 305 bp, Artificial Sequence; identical to SEQ ID NO: 565
  source: /note="Description of Artificial Sequence: Synthetic polynucleotide"
  source: /note="nirB+RBS , FNR-responsive regulatory region"

SEQ ID NO: 575 - DNA, 180 bp, Artificial Sequence; identical to SEQ ID NO: 566
  source: /note="Description of Artificial Sequence: Synthetic polynucleotide"
  source: /note="ydfZ+RBS , FNR-responsive regulatory region"

SEQ ID NO: 576 - DNA, 199 bp, Artificial Sequence; identical to SEQ ID NO: 567
  source: /note="Description of Artificial Sequence: Synthetic polynucleotide"
  source: /note="FNRS1 , FNR-responsive regulatory region"

SEQ ID NO: 577 - DNA, 207 bp, Artificial Sequence
  source: /note="Description of Artificial Sequence: Synthetic polynucleotide"
  source: /note="FNRS2 , FNR-responsive regulatory region"
agttgttcttattggtggtgttgctttatggttgcatcgtagtaaatggttgtaacaaaagcaatttttccggctgtctgtatacaaaaacgccgcaaagtttgagcgaagtcaataaactctctacccattcagggcaatatctctcttggatccaaagtgaactctagaaataattttgtttaactttaagaaggagatatacat

SEQ ID NO: 578 - DNA, 390 bp, Artificial Sequence
  source: /note="Description of Artificial Sequence: Synthetic polynucleotide"
  source: /note="nirB+crp , FNR-responsive regulatory region"
tcgtctttgtgatgtgcttcctgttaggtttcgtcagccgtcaccgtcagcataacaccctgacctctcattaattgctcatgccggacggcactatcgtcgtccggccttttcctctcttcccccgctacgtgcatctatttctataaacccgctcattttgtctattttttgcacaaacatgaaatatcagacaattccgtgacttaagaaaatttatacaaatcagcaatatacccattaaggagtatataaaggtgaatttgatttacatcaataagcggggttgctgaatcgttaaggtagaaatgtgatctagttcacatttgcggtaatagaaaagaaatcgaggcaaaaatgtttgtttaactttaagaaggagatatacat

SEQ ID NO: 579 - DNA, 200 bp, Artificial Sequence
  source: /note="Description of Artificial Sequence: Synthetic polynucleotide"
  source: /note="FNRS+crp , FNR-responsive regulatory region"
agttgttcttattggtggtgttgctttatggttgcatcgtagtaaatggttgtaacaaaagcaatttttccggctgtctgtatacaaaaacgccgcaaagtttgagcgaagtcaataaactctctacccattcagggcaatatctctcaaatgtgatctagttcacattttttgtttaactttaagaaggagatatacat

SEQ ID NO: 580 - DNA, 355 bp, Artificial Sequence
  source: /note="Description of Artificial Sequence: Synthetic polynucleotide"
  source: /note="katG, Regulatory sequence"
tgtggcttttatgaaaatcacacagtgatcacaaattttaaacagagcacaaaatgctgcctcgaaatgagggcgggaaaataaggttatcagccttgttttctccctcattacttgaaggatatgaagctaaaacccttttttataaagcatttgtccgaattcggacataatcaaaaaagcttaattaagatcaatttgatctacatctctttaaccaacaatatgtaagatctcaactatcgcatccgtggattaattcaattataacttctctctaacgctgtgtatcgtaacggtaacactgtagaggggagcacattgatgcgaattcattaaagaggagaaaggtacc

SEQ ID NO: 581 - DNA, 228 bp, Artificial Sequence
  source: /note="Description of Artificial Sequence: Synthetic polynucleotide"
  source: /note="Dps, Regulatory sequence"
ttccgaaaattcctggcgagcagataaataagaattgttcttatcaatatatctaactcattgaatctttattagttttgtttttcacgcttgttaccactattagtgtgataggaacagccagaatagcggaacacatagccggtgctatacttaatctcgttaattactgggacataacatcaagaggatatgaaattcgaattcattaaagaggagaaaggtacc

SEQ ID NO: 582 - DNA, 334 bp, Artificial Sequence
  source: /note="Description of Artificial Sequence: Synthetic polynucleotide"
  source: /note="ahpC, Regulatory sequence"
gcttagatcaggtgattgccctttgtttatgagggtgttgtaatccatgtcgttgttgcatttgtaagggcaacacctcagcctgcaggcaggcactgaagataccaaagggtagttcagattacacggtcacctggaaagggggccattttactttttatcgccgctggcggtgcaaagttcacaaagttgtcttacgaaggttgtaaggtaaaacttatcgatttgataatggaaacgcattagccgaatcggcaaaaattggttaccttacatctcatcgaaaacacggaggaagtatagatgcgaattcattaaagaggagaaaggtacc

SEQ ID NO: 583 - DNA, 134 bp, Artificial Sequence
  source: /note="Description of Artificial Sequence: Synthetic polynucleotide"
  source: /note="oxyS Regulatory sequence"
ctcgagttcattatccatcctccatcgccacgatagttcatggcgataggtagaatagcaatgaacgattatccctatcaagcattctgactgataattgctcacacgaattcattaaagaggagaaaggtacc

SEQ ID NO: 584 - DNA, 1921 bp, Artificial Sequence
  source: /note="Description of Artificial Sequence: Synthetic polynucleotide"
  source: /note="Prp (Propionate)"
ttacccgtctggattttcagtacgcgcttttaaacgacgccacagcgtggtacggctgatccccaaataacgtgcggcggcgcgcttatcgccattaaagcgtgcgagcacctcctgcaatggaagcgcttctgctgacgagggcgtgatttctgctgtggtccccaccagttcaggtaataattgccgcataaattgtctgtccagtgttggtgcgggatcgacgcttaaaaaaagcgccaggcgttccatcatattccgcagttcgcgaatattaccgggccaatgatagttcagtagaagcggctgacactgcgtcagcccatgacgcaccgattcggtaaaagggatctccatcgcggccagcgattgttttaaaaagttttccgccagaggcagaatatcaggctgtcgctcgcgcaaggggggaagcggcagacgcagaatgctcaaacggtaaaacagatcggtacgaaaacgtccttgcgttatctcccgatccagatcgcaatgcgtggcgctgatcacccggacatctaccgggatcggctgatgcccgccaacgcgggtgacggctttttcctccagtacgcgtagaaggcgggtttgtaacggcagcggcatttcgccaatttcgtcaagaaacagcgtgccgccgtgggcgacctcaaacagccccgcacgtccacctcgtcttgagccggtaaacgctccctcctcatagccaaacagttcagcctccagcaacgactcggtaatcgcgccgcaattaacggcgacaaagggcggagaaggcttgttctgacggtggggctgacggttaaacaacgcctgatgaatcgcttgcgccgccagctctttcccggtccctgtttccccctgaatcagcactgccgcgcgggaacgggcatagagtgtaatcgtatggcgaacctgctccatttgtggtgaatcgccgaggatatcgctcagcgcataacgggtctgtaatcccttgctggaggtatgctggctatactgacgccgtgtcaggcgggtcatatccagcgcatcatggaaagcctgacgtacggtggccgctgaataaataaagatggcggtcattcctgcctcttccgccaggtcggtaattagtcctgccccaattacagcctcaatgccgttagctttgagctcgttaatttgcccgcgagcatcctcttcagtgatatagcttcgctgttcaagacggaggtgaaacgttttctgaaaggcgaccagagccggaatggtctcctgataggtcacgattcccattgaggaagtcagctttcccgcttttgccagagcctgtaatacatcgaatccgctgggtttgatgaggatgacaggtaccgacagtcggctttttaaataagcgccgttggaacctgccgcgataatcgcgtcgcagcgttcggttgccagttttttgcgaatgtaggctactgccttttcaaaaccgagctgaataggcgtgatcgtcgccagatgatcaaactccaggctgatatcccgaaatagttcgaacaggcgcgttaccgagaccgtccagatcaccggtttatcgctattatcgcgcgaagcgctatgcacagtaaccatcgtcgtagattcatgtttaaggaacgaattcttgttttatagatgtttcgttaatgttgcaatgaaacacaggcctccgtttcatgaaacgttagctgactcgtttttcttgtgactcgtctgtcagtattaaaaaagatttttcatttaactgattgtttttaaattgaattttatttaatggtttctcggtttttgggtctggcatatcccttgctttaatgagtgcatcttaattaacaattcaataacaagagggctgaatagtaatttcaacaaaataacgagcattcgaatg

SEQ ID NO: 585 - DNA, 305 bp, Artificial Sequence
  source: /note="Description of Artificial Sequence: Synthetic polynucleotide"
  source: /note="Arabinose Promoter region"
cagacattgccgtcactgcgtcttttactggctcttctcgctaacccaaccggtaaccccgcttattaaaagcattctgtaacaaagcgggaccaaagccatgacaaaaacgcgtaacaaaagtgtctataatcacggcagaaaagtccacattgattatttgcacggcgtcacactttgctatgccatagcatttttatccataagattagcggatccagcctgacgctttttttcgcaactctctactgtttctccatacctctagaaataattttgtttaactttaagaaggagatatacat

SEQ ID NO: 586 - DNA, 897 bp, Artificial Sequence
  source: /note="Description of Artificial Sequence: Synthetic polynucleotide"
  source: /note="AraC (reverse orientation)"
ttattcacaacctgccctaaactcgctcggactcgccccggtgcattttttaaatactcgcgagaaatagagttgatcgtcaaaaccgacattgcgaccgacggtggcgataggcatccgggtggtgctcaaaagcagcttcgcctgactgatgcgctggtcctcgcgccagcttaatacgctaatccctaactgctggcggaacaaatgcgacagacgcgacggcgacaggcagacatgctgtgcgacgctggcgatatcaaaattactgtctgccaggtgatcgctgatgtactgacaagcctcgcgtacccgattatccatcggtggatggagcgactcgttaatcgcttccatgcgccgcagtaacaattgctcaagcagatttatcgccagcaattccgaatagcgcccttccccttgtccggcattaatgatttgcccaaacaggtcgctgaaatgcggctggtgcgcttcatccgggcgaaagaaaccggtattggcaaatatcgacggccagttaagccattcatgccagtaggcgcgcggacgaaagtaaacccactggtgataccattcgtgagcctccggatgacgaccgtagtgatgaatctctccaggcgggaacagcaaaatatcacccggtcggcagacaaattctcgtccctgatttttcaccaccccctgaccgcgaatggtgagattgagaatataacctttcattcccagcggtcggtcgataaaaaaatcgagataaccgttggcctcaatcggcgttaaacccgccaccagatgggcgttaaacgagtatcccggcagcaggggatcattttgcgcttcagccatacttttcatactcccgccattcagagaagaaaccaattgtccatattgcat

SEQ ID NO: 587 - protein, 298 aa, Artificial Sequence
  source: /note="Description of Artificial Sequence: Synthetic polypeptide"
  source: /note="AraC polypeptide"
MQYGQLVSSLNGGSMKSMAEAQNDPLLPGYSFNAHLVAGLTPIEANGYLDFFIDRPLGMKGYILNLTIRGQGVVKNQGREFVCRPGDILLFPPGEIHHYGRHPEAHEWYHQWVYFRPRAYWHEWLNWPSIFANTGFFRPDEAHQPHFSDLFGQIINAGQGEGRYSELLAINLLEQLLLRRMEAINESLHPPMDNRVREACQYISDHLADSNFDIASVAQHVCLSPSRLSHLFRQQLGISVLSWREDQRISQAKLLLSTTRMPIATVGRNVGFDDQLYFSRVFKKCTGASPSEFRAGCE

SEQ ID NO: 588 - DNA, 280 bp, Artificial Sequence
  source: /note="Description of Artificial Sequence: Synthetic polynucleotide"
  source: /note="Region comprising rhamnose inducible promoter"
cggtgagcatcacatcaccacaattcagcaaattgtgaacatcatcacgttcatctttccctggttgccaatggcccattttcctgtcagtaacgagaaggtcgcgaatcaggcgctttttagactggtcgtaatgaaattcagctgtcaccggatgtgctttccggtctgatgagtccgtgaggacgaaacagcctctacaaataattttgtttaaaacaacacccactaagataactctagaaataattttgtttaactttaagaaggagatatacat

SEQ ID NO: 589 - DNA, 326 bp, Artificial Sequence
  source: /note="Description of Artificial Sequence: Synthetic polynucleotide"
  source: /note="Lac Promoter region"
attcaccaccctgaattgactctcttccgggcgctatcatgccataccgcgaaaggttttgcgccattcgatggcgcgccgcttcgtcaggccacatagctttcttgttctgatcggaacgatcgttggctgtgttgacaattaatcatcggctcgtataatgtgtggaattgtgagcgctcacaattagctgtcaccggatgtgctttccggtctgatgagtccgtgaggacgaaacagcctctacaaataattttgtttaaaacaacacccactaagataactctagaaataattttgtttaactttaagaaggagatatacat

SEQ ID NO: 590 - DNA, 1083 bp, Artificial Sequence
  source: /note="Description of Artificial Sequence: Synthetic polynucleotide"
  source: /note="LacI (in reverse orientation)"
tcactgcccgctttccagtcgggaaacctgtcgtgccagctgcattaatgaatcggccaacgcgcggggagaggcggtttgcgtattgggcgccagggtggtttttcttttcaccagtgagactggcaacagctgattgcccttcaccgcctggccctgagagagttgcagcaagcggtccacgctggtttgccccagcaggcgaaaatcctgtttgatggtggttaacggcgggatataacatgagctatcttcggtatcgtcgtatcccactaccgagatatccgcaccaacgcgcagcccggactcggtaatggcgcgcattgcgcccagcgccatctgatcgttggcaaccagcatcgcagtgggaacgatgccctcattcagcatttgcatggtttgttgaaaaccggacatggcactccagtcgccttcccgttccgctatcggctgaatttgattgcgagtgagatatttatgccagccagccagacgcagacgcgccgagacagaacttaatgggcccgctaacagcgcgatttgctggtgacccaatgcgaccagatgctccacgcccagtcgcgtaccgtcctcatgggagaaaataatactgttgatgggtgtctggtcagagacatcaagaaataacgccggaacattagtgcaggcagcttccacagcaatggcatcctggtcatccagcggatagttaatgatcagcccactgacgcgttgcgcgagaagattgtgcaccgccgctttacaggcttcgacgccgcttcgttctaccatcgacaccaccacgctggcacccagttgatcggcgcgagatttaatcgccgcgacaatttgcgacggcgcgtgcagggccagactggaggtggcaacgccaatcagcaacgactgtttgcccgccagttgttgtgccacgcggttgggaatgtaattcagctccgccatcgccgcttccactttttcccgcgttttcgcagaaacgtggctggcctggttcaccacgcgggaaacggtctgataagagacaccggcatactctgcgacatcgtataacgttactggtttcat

SEQ ID NO: 591 - protein, 360 aa, Artificial Sequence
  source: /note="Description of Artificial Sequence: Synthetic polypeptide"
  source: /note="LacI polypeptide sequence"
MKPVTLYDVAEYAGVSYQTVSRVVNQASHVSAKTREKVEAAMAELNYIPNRVAQQLAGKQSLLIGVATSSLALHAPSQIVAAIKSRADQLGASVVVSMVERSGVEACKAAVHNLLAQRVSGLIINYPLDDQDAIAVEAACTNVPALFLDVSDQTPINSIIFSHEDGTRLGVEHLVALGHQQIALLAGPLSSVSARLRLAGWHKYLTRNQIQPIAEREGDWSAMSGFQQTMQMLNEGIVPTAMLVANDQMALGAMRAITESGLRVGADISVVGYDDTEDSSCYIPPLTTIKQDFRLLGQTSVDRLLQLSQGQAVKGNQLLPVSLVKRKTTLAPNTQTASPRALADSLMQLARQVSRLESGQ

SEQ ID NO: 592 - DNA, 222 bp, Artificial Sequence
  source: /note="Description of Artificial Sequence: Synthetic polynucleotide"
  source: /note="Region comprising Temperature sensitive promoter"
acgttaaatctatcaccgcaagggataaatatctaacaccgtgcgtgttgactattttacctctggcggtgataatggttgcatagctgtcaccggatgtgctttccggtctgatgagtccgtgaggacgaaacagcctctacaaataattttgtttaaaacaacacccactaagataactctagaaataattttgtttaactttaagaaggagatatacat

SEQ ID NO: 593 - DNA, 714 bp, Artificial Sequence
  source: /note="Description of Artificial Sequence: Synthetic polynucleotide"
  source: /note="mutant cI857 repressor"
tcagccaaacgtctcttcaggccactgactagcgataactttccccacaacggaacaactctcattgcatgggatcattgggtactgtgggtttagtggttgtaaaaacacctgaccgctatccctgatcagtttcttgaaggtaaactcatcacccccaagtctggctatgcagaaatcacctggctcaacagcctgctcagggtcaacgagaattaacattccgtcaggaaagcttggcttggagcctgttggtgcggtcatggaattaccttcaacctcaagccagaatgcagaatcactggcttttttggttgtgcttacccatctctccgcatcacctttggtaaaggttctaagcttaggtgagaacatccctgcctgaacatgagaaaaaacagggtactcatactcacttctaagtgacggctgcatactaaccgcttcatacatctcgtagatttctctggcgattgaagggctaaattcttcaacgctaactttgagaatttttgtaagcaatgcggcgttataagcatttaatgcattgatgccattaaataaagcaccaacgcctgactgccccatccccatcttgtctgcgacagattcctgggataagccaagttcatttttctttttttcataaattgctttaaggcgacgtgcgtcctcaagctgctcttgtgttaatggtttcttttttgtgctcat

SEQ ID NO: 594 - DNA, 43 bp, Artificial Sequence
  source: /note="Description of Artificial Sequence: Synthetic oligonucleotide"
  source: /note="RBS and leader region"
ctctagaaataattttgtttaactttaagaaggagatatacat

SEQ ID NO: 595 - protein, 237 aa, Artificial Sequence
  source: /note="Description of Artificial Sequence: Synthetic polypeptide"
  source: /note="mutant cI857 repressor polypeptide sequence"
MSTKKKPLTQEQLEDARRLKAIYEKKKNELGLSQESVADKMGMGQSGVGALFNGINALNAYNAALLTKILKVSVEEFSPSIAREIYEMYEAVSMQPSLRSEYEYPVFSHVQAGMFSPKLRTFTKGDAERWVSTTKKASDSAFWLEVEGNSMTAPTGSKPSFPDGMLILVDPEQAVEPGDFCIARLGGDEFTFKKLIRDSGQVFLQPLNPQYPMIPCNESCSVVGKVIASQWPEETFG

SEQ ID NO: 596 - DNA, 748 bp, Artificial Sequence
  source: /note="Description of Artificial Sequence: Synthetic polynucleotide"
  source: /note="TetR-Tet promoter construct"
ttaagacccactttcacatttaagttgtttttctaatccgcatatgatcaattcaaggccgaataagaaggctggctctgcaccttggtgatcaaataattcgatagcttgtcgtaataatggcggcatactatcagtagtaggtgtttccctttcttctttagcgacttgatgctcttgatcttccaatacgcaacctaaagtaaaatgccccacagcgctgagtgcatataatgcattctctagtgaaaaaccttgttggcataaaaaggctaattgattttcgagagtttcatactgtttttctgtaggccgtgtacctaaatgtacttttgctccatcgcgatgacttagtaaagcacatctaaaacttttagcgttattacgtaaaaaatcttgccagctttccccttctaaagggcaaaagtgagtatggtgcctatctaacatctcaatggctaaggcgtcgagcaaagcccgcttattttttacatgccaatacaatgtaggctgctctacacctagcttctgggcgagtttacgggttgttaaaccttcgattccgacctcattaagcagctctaatgcgctgttaatcactttacttttatctaatctagacatcattaattcctaatttttgttgacactctatcattgatagagttattttaccactccctatcagtgatagagaaaagtgaactctagaaataattttgtttaactttaagaaggagatatacat

SEQ ID NO: 597 - DNA, 225 bp, Artificial Sequence
  source: /note="Description of Artificial Sequence: Synthetic polynucleotide"
  source: /note="PssB promoter"
tcacctttcccggattaaacgcttttttgcccggtggcatggtgctaccggcgatcacaaacggttaattatgacacaaattgacctgaatgaatatacagtattggaatgcattacccggagtgttgtgtaacaatgtctggccaggtttgtttcccggaaccgaggtcacaacatagtaaaagcgctattggtaatggtacaatcgcgcgtttacacttattc

SEQ ID NO: 598 - DNA, 30 bp, Artificial Sequence
  source: /note="Description of Artificial Sequence: Synthetic oligonucleotide"
  source: /note="BBa_I14018"
gtttatacataggcgagtactctgttatgg

SEQ ID NO: 599 - DNA, 30 bp, Artificial Sequence
  source: /note="Description of Artificial Sequence: Synthetic oligonucleotide"
  source: /note="BBa_I14033"
agaggttccaactttcaccataatgaaaca

SEQ ID NO: 600 - DNA, 30 bp, Artificial Sequence
  source: /note="Description of Artificial Sequence: Synthetic oligonucleotide"
  source: /note="BBa_I14034"
taaacaactaacggacaattctacctaaca

SEQ ID NO: 601 - DNA, 30 bp, Artificial Sequence
  source: /note="Description of Artificial Sequence: Synthetic oligonucleotide"
  source: /note="BBa_I732021"
acatcaagccaaattaaacaggattaacac

SEQ ID NO: 602 - DNA, 30 bp, Artificial Sequence
  source: /note="Description of Artificial Sequence: Synthetic oligonucleotide"
  source: /note="BBa_I742126"
gaggtaaaatagtcaacacgcacggtgtta

SEQ ID NO: 603 - DNA, 30 bp, Artificial Sequence
  source: /note="Description of Artificial Sequence: Synthetic oligonucleotide"
  source: /note="BBa_J01006"
caggccggaataactccctataatgcgcca

SEQ ID NO: 604 - DNA, 30 bp, Artificial Sequence
  source: /note="Description of Artificial Sequence: Synthetic oligonucleotide"
  source: /note="BBa_J23100"
ggctagctcagtcctaggtacagtgctagc

SEQ ID NO: 605 - DNA, 30 bp, Artificial Sequence
  source: /note="Description of Artificial Sequence: Synthetic oligonucleotide"
  source: /note="BBa_J23101"
agctagctcagtcctaggtattatgctagc

SEQ ID NO: 606 - DNA, 30 bp, Artificial Sequence
  source: /note="Description of Artificial Sequence: Synthetic oligonucleotide"
  source: /note="BBa_J23102"
agctagctcagtcctaggtactgtgctagc

SEQ ID NO: 607 - DNA, 30 bp, Artificial Sequence
  source: /note="Description of Artificial Sequence: Synthetic oligonucleotide"
  source: /note="BBa_J23103"
agctagctcagtcctagggattatgctagc

SEQ ID NO: 608 - DNA, 30 bp, Artificial Sequence
  source: /note="Description of Artificial Sequence: Synthetic oligonucleotide"
  source: /note="BBa_J23104"
agctagctcagtcctaggtattgtgctagc

SEQ ID NO: 609 - DNA, 30 bp, Artificial Sequence
  source: /note="Description of Artificial Sequence: Synthetic oligonucleotide"
  source: /note="BBa_J23105"
ggctagctcagtcctaggtactatgctagc

SEQ ID NO: 610 - DNA, 30 bp, Artificial Sequence
  source: /note="Description of Artificial Sequence: Synthetic oligonucleotide"
  source: /note="BBa_J23106"
ggctagctcagtcctaggtatagtgctagc

SEQ ID NO: 611 - DNA, 30 bp, Artificial Sequence
  source: /note="Description of Artificial Sequence: Synthetic oligonucleotide"
  source: /note="BBa_J23107"
ggctagctcagccctaggtattatgctagc

SEQ ID NO: 612 - DNA, 30 bp, Artificial Sequence
  source: /note="Description of Artificial Sequence: Synthetic oligonucleotide"
  source: /note="BBa_J23108"
agctagctcagtcctaggtataatgctagc

SEQ ID NO: 613 - DNA, 30 bp, Artificial Sequence
  source: /note="Description of Artificial Sequence: Synthetic oligonucleotide"
  source: /note="BBa_J23109"
agctagctcagtcctagggactgtgctagc

SEQ ID NO: 614 - DNA, 30 bp, Artificial Sequence
  source: /note="Description of Artificial Sequence: Synthetic oligonucleotide"
  source: /note="BBa_J23110"
ggctagctcagtcctaggtacaatgctagc

SEQ ID NO: 615 - DNA, 30 bp, Artificial Sequence; identical to SEQ ID NO: 610
  source: /note="Description of Artificial Sequence: Synthetic oligonucleotide"
  source: /note="BBa_J23111"

SEQ ID NO: 616 - DNA, 30 bp, Artificial Sequence; identical to SEQ ID NO: 607
  source: /note="Description of Artificial Sequence: Synthetic oligonucleotide"
  source: /note="BBa_J23112"

SEQ ID NO: 617 - DNA, 30 bp, Artificial Sequence
  source: /note="Description of Artificial Sequence: Synthetic oligonucleotide"
  source: /note="BBa_J23113"
ggctagctcagtcctagggattatgctagc

SEQ ID NO: 618 - DNA, 30 bp, Artificial Sequence; identical to SEQ ID NO: 614
  source: /note="Description of Artificial Sequence: Synthetic oligonucleotide"
  source: /note="BBa_J23114"

SEQ ID NO: 619 - DNA, 30 bp, Artificial Sequence
  source: /note="Description of Artificial Sequence: Synthetic oligonucleotide"
  source: /note="BBa_J23115"
agctagctcagcccttggtacaatgctagc

SEQ ID NO: 620 - DNA, 30 bp, Artificial Sequence
  source: /note="Description of Artificial Sequence: Synthetic oligonucleotide"
  source: /note="BBa_J23116"
agctagctcagtcctagggactatgctagc

SEQ ID NO: 621 - DNA, 30 bp, Artificial Sequence
  source: /note="Description of Artificial Sequence: Synthetic oligonucleotide"
  source: /note="BBa_J23117"
agctagctcagtcctagggattgtgctagc

SEQ ID NO: 622 - DNA, 30 bp, Artificial Sequence
  source: /note="Description of Artificial Sequence: Synthetic oligonucleotide"
  source: /note="BBa_J23118"
ggctagctcagtcctaggtattgtgctagc

SEQ ID NO: 623 - DNA, 30 bp, Artificial Sequence; identical to SEQ ID NO: 612
  source: /note="Description of Artificial Sequence: Synthetic oligonucleotide"
  source: /note="BBa_J23119"

SEQ ID NO: 624 - DNA, 30 bp, Artificial Sequence
  source: /note="Description of Artificial Sequence: Synthetic oligonucleotide"
  source: /note="BBa_J23150"
ggctagctcagtcctaggtattatgctagc

SEQ ID NO: 625 - DNA, 30 bp, Artificial Sequence; identical to SEQ ID NO: 614
  source: /note="Description of Artificial Sequence: Synthetic oligonucleotide"
  source: /note="BBa_J23151"

SEQ ID NO: 626 - DNA, 30 bp, Artificial Sequence
  source: /note="Description of Artificial Sequence: Synthetic oligonucleotide"
  source: /note="BBa_J44002"
aaagtgtgacgccgtgcaaataatcaatgt

SEQ ID NO: 627 - DNA, 30 bp, Artificial Sequence
  source: /note="Description of Artificial Sequence: Synthetic oligonucleotide"
  source: /note="BBa_J48104"
gacgaatacttaaaatcgtcatacttattt

SEQ ID NO: 628 - DNA, 30 bp, Artificial Sequence
  source: /note="Description of Artificial Sequence: Synthetic oligonucleotide"
  source: /note="BBa_J54200"
aaacctttcgcggtatggcatgatagcgcc

SEQ ID NO: 629 - DNA, 30 bp, Artificial Sequence
  source: /note="Description of Artificial Sequence: Synthetic oligonucleotide"
  source: /note="BBa_J56015"
tgatagcgcccggaagagagtcaattcagg

SEQ ID NO: 630 - DNA, 30 bp, Artificial Sequence
  source: /note="Description of Artificial Sequence: Synthetic oligonucleotide"
  source: /note="BBa_J64951"
ttatttaccgtgacgaactaattgctcgtg

SEQ ID NO: 631 - DNA, 30 bp, Artificial Sequence
  source: /note="Description of Artificial Sequence: Synthetic oligonucleotide"
  source: /note="BBa_K088007"
catacgccgttatacgttgtttacgctttg

SEQ ID NO: 632 - DNA, 30 bp, Artificial Sequence
  source: /note="Description of Artificial Sequence: Synthetic oligonucleotide"
  source: /note="BBa_K119000"
ttatgcttccggctcgtatgttgtgtggac

SEQ ID NO: 633 - DNA, 30 bp, Artificial Sequence
  source: /note="Description of Artificial Sequence: Synthetic oligonucleotide"
  source: /note="BBa_K119001"
ttatgcttccggctcgtatggtgtgtggac

SEQ ID NO: 634 - DNA, 30 bp, Artificial Sequence; identical to SEQ ID NO: 609
  source: /note="Description of Artificial Sequence: Synthetic oligonucleotide"
  source: /note="BBa_K1330002"

SEQ ID NO: 635 - DNA, 30 bp, Artificial Sequence
  source: /note="Description of Artificial Sequence: Synthetic oligonucleotide"
  source: /note="BBa_K137029"
atatatatatatatataatggaagcgtttt

SEQ ID NO: 636 - DNA, 30 bp, Artificial Sequence; identical to SEQ ID NO: 635
  source: /note="Description of Artificial Sequence: Synthetic oligonucleotide"
  source: /note="BBa_K137030"

SEQ ID NO: 637 - DNA, 30 bp, Artificial Sequence
  source: /note="Description of Artificial Sequence: Synthetic oligonucleotide"
  source: /note="BBa_K137031"
ccccgaaagcttaagaatataattgtaagc

SEQ ID NO: 638 - DNA, 30 bp, Artificial Sequence; identical to SEQ ID NO: 637
  source: /note="Description of Artificial Sequence: Synthetic oligonucleotide"
  source: /note="BBa_K137032"

SEQ ID NO: 639 - DNA, 30 bp, Artificial Sequence
  source: /note="Description of Artificial Sequence: Synthetic oligonucleotide"
  source: /note="BBa_K137085"
tgacaatatatatatatatataatgctagc

SEQ ID NO: 640 - DNA, 30 bp, Artificial Sequence
  source: /note="Description of Artificial Sequence: Synthetic oligonucleotide"
  source: /note="BBa_K137086"
acaatatatatatatatatataatgctagc

SEQ ID NO: 641 - DNA, 30 bp, Artificial Sequence
  source: /note="Description of Artificial Sequence: Synthetic oligonucleotide"
  source: /note="BBa_K137087"
aatatatatatatatatatataatgctagc

SEQ ID NO: 642 - DNA, 30 bp, Artificial Sequence
  source: /note="Description of Artificial Sequence: Synthetic oligonucleotide"
  source: /note="BBa_K137088"
tatatatatatatatatatataatgctagc

SEQ ID NO: 643 - DNA, 30 bp, Artificial Sequence; identical to SEQ ID NO: 642
  source: /note="Description of Artificial Sequence: Synthetic oligonucleotide"
  source: /note="BBa_K137089"

SEQ ID NO: 644 - DNA, 30 bp, Artificial Sequence
  source: /note="Description of Artificial Sequence: Synthetic oligonucleotide"
  source: /note="BBa_K137090"
aaaaaaaaaaaaaaaaaatataatgctagc

SEQ ID NO: 645 - DNA, 30 bp, Artificial Sequence; identical to SEQ ID NO: 644
  source: /note="Description of Artificial Sequence: Synthetic oligonucleotide"
  source: /note="BBa_K137091"

SEQ ID NO: 646 - DNA, 30 bp, Artificial Sequence
  source: /note="Description of Artificial Sequence: Synthetic oligonucleotide"
  source: /note="BBa_K1585100"
ggaattgtgagcggataacaatttcacaca

SEQ ID NO: 647 - DNA, 30 bp, Artificial Sequence; identical to SEQ ID NO: 646
  source: /note="Description of Artificial Sequence: Synthetic oligonucleotide"
  source: /note="BBa_K1585101"

SEQ ID NO: 648 - DNA, 30 bp, Artificial Sequence; identical to SEQ ID NO: 646
  source: /note="Description of Artificial Sequence: Synthetic oligonucleotide"
  source: /note="BBa_K1585102"

SEQ ID NO: 649 - DNA, 30 bp, Artificial Sequence; identical to SEQ ID NO: 646
  source: /note="Description of Artificial Sequence: Synthetic oligonucleotide"
  source: /note="BBa_K1585103"

SEQ ID NO: 650 - DNA, 30 bp, Artificial Sequence; identical to SEQ ID NO: 646
  source: /note="Description of Artificial Sequence: Synthetic oligonucleotide"
  source: /note="BBa_K1585104"

SEQ ID NO: 651 - DNA, 30 bp, Artificial Sequence; identical to SEQ ID NO: 646
  source: /note="Description of Artificial Sequence: Synthetic oligonucleotide"
  source: /note="BBa_K1585105"

SEQ ID NO: 652 - DNA, 30 bp, Artificial Sequence; identical to SEQ ID NO: 646
  source: /note="Description of Artificial Sequence: Synthetic oligonucleotide"
  source: /note="BBa_K1585106"

SEQ ID NO: 653 - DNA, 30 bp, Artificial Sequence; identical to SEQ ID NO: 646
  source: /note="Description of Artificial Sequence: Synthetic oligonucleotide"
  source: /note="BBa_K1585110"

SEQ ID NO: 654 - DNA, 30 bp, Artificial Sequence; identical to SEQ ID NO: 646
  source: /note="Description of Artificial Sequence: Synthetic oligonucleotide"
  source: /note="BBa_K1585113"

SEQ ID NO: 655 - DNA, 30 bp, Artificial Sequence; identical to SEQ ID NO: 646
  source: /note="Description of Artificial Sequence: Synthetic oligonucleotide"
  source: /note="BBa_K1585115"

SEQ ID NO: 656 - DNA, 30 bp, Artificial Sequence; identical to SEQ ID NO: 646
  source: /note="Description of Artificial Sequence: Synthetic oligonucleotide"
  source: /note="BBa_K1585116"

SEQ ID NO: 657 - DNA, 30 bp, Artificial Sequence; identical to SEQ ID NO: 646
  source: /note="Description of Artificial Sequence: Synthetic oligonucleotide"
  source: /note="BBa_K1585117"

SEQ ID NO: 658 - DNA, 30 bp, Artificial Sequence; identical to SEQ ID NO: 646
  source: /note="Description of Artificial Sequence: Synthetic oligonucleotide"
  source: /note="BBa_K1585118"

SEQ ID NO: 659 - DNA, 30 bp, Artificial Sequence; identical to SEQ ID NO: 646
  source: /note="Description of Artificial Sequence: Synthetic oligonucleotide"
  source: /note="BBa_K1585119"

SEQ ID NO: 660 - DNA, 30 bp, Artificial Sequence
  source: /note="Description of Artificial Sequence: Synthetic oligonucleotide"
  source: /note="BBa_K1824896"
gattaaagaggagaaatactagagtactag

SEQ ID NO: 661 - DNA, 30 bp, Artificial Sequence
  source: /note="Description of Artificial Sequence: Synthetic oligonucleotide"
  source: /note="BBa_K256002"
caccttcgggtgggcctttctgcgtttata

SEQ ID NO: 662 - DNA, 30 bp, Artificial Sequence; identical to SEQ ID NO: 661
  source: /note="Description of Artificial Sequence: Synthetic oligonucleotide"
  source: /note="BBa_K256018"

SEQ ID NO: 663 - DNA, 30 bp, Artificial Sequence; identical to SEQ ID NO: 661
  source: /note="Description of Artificial Sequence: Synthetic oligonucleotide"
  source: /note="BBa_K256020"

SEQ ID NO: 664 - DNA, 30 bp, Artificial Sequence; identical to SEQ ID NO: 661
  source: /note="Description of Artificial Sequence: Synthetic oligonucleotide"
  source: /note="BBa_K256033"

SEQ ID NO: 665 - DNA, 30 bp, Artificial Sequence; identical to SEQ ID NO: 604
  source: /note="Description of Artificial Sequence: Synthetic oligonucleotide"
  source: /note="BBa_K292000"

SEQ ID NO: 666 - DNA, 30 bp, Artificial Sequence
  source: /note="Description of Artificial Sequence: Synthetic oligonucleotide"
  source: /note="BBa_K292001"
tgctagctactagagattaaagaggagaaa

SEQ ID NO: 667 - DNA, 30 bp, Artificial Sequence
  source: /note="Description of Artificial Sequence: Synthetic oligonucleotide"
  source: /note="BBa_K418000"
ttgtgagcggataacaagatactgagcaca

SEQ ID NO: 668 - DNA, 30 bp, Artificial Sequence; identical to SEQ ID NO: 667
  source: /note="Description of Artificial Sequence: Synthetic oligonucleotide"
  source: /note="BBa_K418002"

SEQ ID NO: 669 - DNA, 30 bp, Artificial Sequence; identical to SEQ ID NO: 667
  source: /note="Description of Artificial Sequence: Synthetic oligonucleotide"
  source: /note="BBa_K418003"

SEQ ID NO: 670 - DNA, 30 bp, Artificial Sequence; identical to SEQ ID NO: 604
  source: /note="Description of Artificial Sequence: Synthetic oligonucleotide"
  source: /note="BBa_K823004"

SEQ ID NO: 671 - DNA, 30 bp, Artificial Sequence; identical to SEQ ID NO: 605
  source: /note="Description of Artificial Sequence: Synthetic oligonucleotide"
  source: /note="BBa_K823005"

SEQ ID NO: 672 - DNA, 30 bp, Artificial Sequence; identical to SEQ ID NO: 606
  source: /note="Description of Artificial Sequence: Synthetic oligonucleotide"
  source: /note="BBa_K823006"

SEQ ID NO: 673 - DNA, 30 bp, Artificial Sequence; identical to SEQ ID NO: 607
  source: /note="Description of Artificial Sequence: Synthetic oligonucleotide"
  source: /note="BBa_K823007"

SEQ ID NO: 674 - DNA, 30 bp, Artificial Sequence; identical to SEQ ID NO: 610
  source: /note="Description of Artificial Sequence: Synthetic oligonucleotide"
  source: /note="BBa_K823008"

SEQ ID NO: 675 - DNA, 30 bp, Artificial Sequence; identical to SEQ ID NO: 617
  source: /note="Description of Artificial Sequence: Synthetic oligonucleotide"
  source: /note="BBa_K823010"

SEQ ID NO: 676 - DNA, 30 bp, Artificial Sequence; identical to SEQ ID NO: 614
  source: /note="Description of Artificial Sequence: Synthetic oligonucleotide"
  source: /note="BBa_K823011"

SEQ ID NO: 677 - DNA, 30 bp, Artificial Sequence; identical to SEQ ID NO: 621
  source: /note="Description of Artificial Sequence: Synthetic oligonucleotide"
  source: /note="BBa_K823013"

SEQ ID NO: 678 - DNA, 30 bp, Artificial Sequence; identical to SEQ ID NO: 622
  source: /note="Description of Artificial Sequence: Synthetic oligonucleotide"
  source: /note="BBa_K823014"

SEQ ID NO: 679 - DNA, 30 bp, Artificial Sequence
  source: /note="Description of Artificial Sequence: Synthetic oligonucleotide"
  source: /note="BBa_M13101"
cctgtttttatgttattctctctgtaaagg

SEQ ID NO: 680 - DNA, 30 bp, Artificial Sequence
  source: /note="Description of Artificial Sequence: Synthetic oligonucleotide"
  source: /note="BBa_M13102"
aaatatttgcttatacaatcttcctgtttt

SEQ ID NO: 681 - DNA, 30 bp, Artificial Sequence
  source: /note="Description of Artificial Sequence: Synthetic oligonucleotide"
  source: /note="BBa_M13103"
gctgataaaccgatacaattaaaggctcct

SEQ ID NO: 682 - DNA, 30 bp, Artificial Sequence
  source: /note="Description of Artificial Sequence: Synthetic oligonucleotide"
  source: /note="BBa_M13104"
ctcttctcagcgtcttaatctaagctatcg

SEQ ID NO: 683 - DNA, 30 bp, Artificial Sequence
  source: /note="Description of Artificial Sequence: Synthetic oligonucleotide"
  source: /note="BBa_M13105"
atgagccagttcttaaaatcgcataaggta

SEQ ID NO: 684 - DNA, 30 bp, Artificial Sequence
  source: /note="Description of Artificial Sequence: Synthetic oligonucleotide"
  source: /note="BBa_M13106"
ctattgattgtgacaaaataaacttattcc

SEQ ID NO: 685 - DNA, 30 bp, Artificial Sequence
  source: /note="Description of Artificial Sequence: Synthetic oligonucleotide"
  source: /note="BBa_M13108"
gtttcgcgcttggtataatcgctgggggtc

SEQ ID NO: 686 - DNA, 30 bp, Artificial Sequence
  source: /note="Description of Artificial Sequence: Synthetic oligonucleotide"
  source: /note="BBa_M13110"
ctttgcttctgactataatagtcagggtaa

SEQ ID NO: 687 - DNA, 30 bp, Artificial Sequence
  source: /note="Description of Artificial Sequence: Synthetic oligonucleotide"
  source: /note="BBa_M31519"
aaaccgatacaattaaaggctcctgctagc

SEQ ID NO: 688 - DNA, 30 bp, Artificial Sequence
  source: /note="Description of Artificial Sequence: Synthetic oligonucleotide"
  source: /note="BBa_R1074"
caccacactgatagtgctagtgtagatcac

SEQ ID NO: 689 - DNA, 30 bp, Artificial Sequence
  source: /note="Description of Artificial Sequence: Synthetic oligonucleotide"
  source: /note="BBa_R1075"
gccggaataactccctataatgcgccacca

SEQ ID NO: 690 - DNA, 30 bp, Artificial Sequence
  source: /note="Description of Artificial Sequence: Synthetic oligonucleotide"
  source: /note="BBa_S03331"
ttgacaagcttttcctcagctccgtaaact

SEQ ID NO: 691 - DNA, 30 bp, Artificial Sequence
  source: /note="Description of Artificial Sequence: Synthetic oligonucleotide"
  source: /note="BBa_J45992"
ggtttcaaaattgtgatctatatttaacaa

SEQ ID NO: 692 - DNA, 30 bp, Artificial Sequence; identical to SEQ ID NO: 691
  source: /note="Description of Artificial Sequence: Synthetic oligonucleotide"
  source: /note="BBa_J45993"

SEQ ID NO: 693 - DNA, 30 bp, Artificial Sequence
  source: /note="Description of Artificial Sequence: Synthetic oligonucleotide"
  source: /note="BBa_J45504"
tctattccaataaagaaatcttcctgcgtg

SEQ ID NO: 694 - DNA, 30 bp, Artificial Sequence
  source: /note="Description of Artificial Sequence: Synthetic oligonucleotide"
  source: /note="BBa_K1895002"
gaccgaatatatagtggaaacgtttagatg

SEQ ID NO: 695 - DNA, 30 bp, Artificial Sequence
  source: /note="Description of Artificial Sequence: Synthetic oligonucleotide"
  source: /note="BBa_K1895003"
ccacatcctgtttttaaccttaaaatggca

SEQ ID NO: 696 - DNA, 30 bp, Artificial Sequence
  source: /note="Description of Artificial Sequence: Synthetic oligonucleotide"
  source: /note="BBa_K143012"
aaaaatgggctcgtgttgtacaataaatgt

SEQ ID NO: 697 - DNA, 30 bp, Artificial Sequence
  source: /note="Description of Artificial Sequence: Synthetic oligonucleotide"
  source: /note="BBa_K143013"
aaaaaaagcgcgcgattatgtaaaatataa

SEQ ID NO: 698 - DNA, 30 bp, Artificial Sequence
  source: /note="Description of Artificial Sequence: Synthetic oligonucleotide"
  source: /note="BBa_K780003"
aattgcagtaggcatgacaaaatggactca

SEQ ID NO: 699 - DNA, 30 bp, Artificial Sequence
  source: /note="Description of Artificial Sequence: Synthetic oligonucleotide"
  source: /note="BBa_K823000"
caagcttttcctttataatagaatgaatga

SEQ ID NO: 700 - DNA, 30 bp, Artificial Sequence
  source: /note="Description of Artificial Sequence: Synthetic oligonucleotide"
  source: /note="BBa_K823002"
tctaagctagtgtattttgcgtttaatagt

SEQ ID NO: 701 - DNA, 30 bp, Artificial Sequence
  source: /note="Description of Artificial Sequence: Synthetic oligonucleotide"
  source: /note="BBa_K823003"
aatgggctcgtgttgtacaataaatgtagt

SEQ ID NO: 702 - DNA, 30 bp, Artificial Sequence
  source: /note="Description of Artificial Sequence: Synthetic oligonucleotide"
  source: /note="BBa_K143010"
atccttatcgttatgggtattgtttgtaat

SEQ ID NO: 703 - DNA, 30 bp, Artificial Sequence
  source: /note="Description of Artificial Sequence: Synthetic oligonucleotide"
  source: /note="BBa_K143011"
taaaagaattgtgagcgggaatacaacaac

SEQ ID NO: 704 - DNA, 30 bp, Artificial Sequence; identical to SEQ ID NO: 697
  source: /note="Description of Artificial Sequence: Synthetic oligonucleotide"
  source: /note="BBa_K143013"

SEQ ID NO: 705 - DNA, 30 bp, Artificial Sequence
  source: /note="Description of Artificial Sequence: Synthetic oligonucleotide"
  source: /note="BBa_K112706"
tacaaaataattcccctgcaaacattatca

SEQ ID NO: 706 - DNA, 30 bp, Artificial Sequence
  source: /note="Description of Artificial Sequence: Synthetic oligonucleotide"
  source: /note="BBa_K112707"
tacaaaataattcccctgcaaacattatcg

SEQ ID NO: 707 - DNA, 30 bp, Artificial Sequence
  source: /note="Description of Artificial Sequence: Synthetic oligonucleotide"
  source: /note="BBa_I712074"
agggaatacaagctacttgttctttttgca

SEQ ID NO: 708 - DNA, 23 bp, Artificial Sequence
  source: /note="Description of Artificial Sequence: Synthetic oligonucleotide"
  source: /note="BBa_I719005"
taatacgactcactatagggaga

SEQ ID NO: 709 - DNA, 28 bp, Artificial Sequence
  source: /note="Description of Artificial Sequence: Synthetic oligonucleotide"
  source: /note="BBa_J34814"
gaatttaatacgactcactatagggaga

SEQ ID NO: 710 - DNA, 19 bp, Artificial Sequence
  source: /note="Description of Artificial Sequence: Synthetic oligonucleotide"
  source: /note="BBa_J64997"
taatacgactcactatagg

SEQ ID NO: 711 - DNA, 30 bp, Artificial Sequence
  source: /note="Description of Artificial Sequence: Synthetic oligonucleotide"
  source: /note="BBa_K113010"
gagtcgtattaatacgactcactatagggg

SEQ ID NO: 712 - DNA, 30 bp, Artificial Sequence
  source: /note="Description of Artificial Sequence: Synthetic oligonucleotide"
  source: /note="BBa_K113011"
agtgagtcgtactacgactcactatagggg

SEQ ID NO: 713 - DNA, 30 bp, Artificial Sequence
  source: /note="Description of Artificial Sequence: Synthetic oligonucleotide"
  source: /note="BBa_K113012"
gagtcgtattaatacgactctctatagggg

SEQ ID NO: 714 - DNA, 18 bp, Artificial Sequence
  source: /note="Description of Artificial Sequence: Synthetic oligonucleotide"
  source: /note="BBa_K1614000"
taatacgactcactatag

SEQ ID NO: 715 - DNA, 23 bp, Artificial Sequence
  source: /note="Description of Artificial Sequence: Synthetic oligonucleotide"
  source: /note="BBa_R0085"
taatacgactcactatagggaga

SEQ ID NO: 716 - DNA, 23 bp, Artificial Sequence
  source: /note="Description of Artificial Sequence: Synthetic oligonucleotide"
  source: /note="BBa_R0180"
ttatacgactcactatagggaga

SEQ ID NO: 717 - DNA, 23 bp, Artificial Sequence
  source: /note="Description of Artificial Sequence: Synthetic oligonucleotide"
  source: /note="BBa_R0181"
gaatacgactcactatagggaga

SEQ ID NO: 718 - DNA, 23 bp, Artificial Sequence
  source: /note="Description of Artificial Sequence: Synthetic oligonucleotide"
  source: /note="BBa_R0182"
taatacgtctcactatagggaga

SEQ ID NO: 719 - DNA, 23 bp, Artificial Sequence
  source: /note="Description of Artificial Sequence: Synthetic oligonucleotide"
  source: /note="BBa_R0183"
tcatacgactcactatagggaga

SEQ ID NO: 720 - DNA, 30 bp, Artificial Sequence
  source: /note="Description of Artificial Sequence: Synthetic oligonucleotide"
  source: /note="BBa_Z0251"
taatacgactcactatagggagaccacaac

SEQ ID NO: 721 - DNA, 30 bp, Artificial Sequence
  source: /note="Description of Artificial Sequence: Synthetic oligonucleotide"
  source: /note="BBa_Z0252"
taattgaactcactaaagggagaccacagc

SEQ ID NO: 722 - DNA, 30 bp, Artificial Sequence
  source: /note="Description of Artificial Sequence: Synthetic oligonucleotide"
  source: /note="BBa_Z0253"
cgaagtaatacgactcactattagggaaga

SEQ ID NO: 723 - DNA, 19 bp, Artificial Sequence
  source: /note="Description of Artificial Sequence: Synthetic oligonucleotide"
atttaggtgacactataga

SEQ ID NO: 724 - DNA, 30 bp, Artificial Sequence
  source: /note="Description of Artificial Sequence: Synthetic oligonucleotide"
  source: /note="BBa_I766555"
acaaacacaaatacacacactaaattaata

SEQ ID NO: 725 - DNA, 30 bp, Artificial Sequence
  source: /note="Description of Artificial Sequence: Synthetic oligonucleotide"
  source: /note="BBa_I766556"
ccaagcatacaatcaactatctcatataca

SEQ ID NO: 726 - DNA, 30 bp, Artificial Sequence
  source: /note="Description of Artificial Sequence: Synthetic oligonucleotide"
  source: /note="BBa_I766557"
gatacaggatacagcggaaacaacttttaa

SEQ ID NO: 727 - DNA, 30 bp, Artificial Sequence
  source: /note="Description of Artificial Sequence: Synthetic oligonucleotide"
  source: /note="BBa_J63005"
tttcaagctataccaagcatacaatcaact

SEQ ID NO: 728 - DNA, 30 bp, Artificial Sequence
  source: /note="Description of Artificial Sequence: Synthetic oligonucleotide"
  source: /note="BBa_K105027"
cctttgcagcataaattactatacttctat

SEQ ID NO: 729 - DNA, 30 bp, Artificial Sequence; identical to SEQ ID NO: 728
  source: /note="Description of Artificial Sequence: Synthetic oligonucleotide"
  source: /note="BBa_K105028"

SEQ ID NO: 730 - DNA, 30 bp, Artificial Sequence; identical to SEQ ID NO: 728
  source: /note="Description of Artificial Sequence: Synthetic oligonucleotide"
  source: /note="BBa_K105029"

SEQ ID NO: 731 - DNA, 30 bp, Artificial Sequence; identical to SEQ ID NO: 728
  source: /note="Description of Artificial Sequence: Synthetic oligonucleotide"
  source: /note="BBa_K105030"

SEQ ID NO: 732 - DNA, 30 bp, Artificial Sequence; identical to SEQ ID NO: 728
  source: /note="Description of Artificial Sequence: Synthetic oligonucleotide"
  source: /note="BBa_K105031"

SEQ ID NO: 733 - DNA, 30 bp, Artificial Sequence
  source: /note="Description of Artificial Sequence: Synthetic oligonucleotide"
  source: /note="BBa_K122000"
ttatctactttttacaacaaatataaaaca

SEQ ID NO: 734 - DNA, 30 bp, Artificial Sequence; identical to SEQ ID NO: 724
  source: /note="Description of Artificial Sequence: Synthetic oligonucleotide"
  source: /note="BBa_K124000"

SEQ ID NO: 735 - DNA, 30 bp, Artificial Sequence
  source: /note="Description of Artificial Sequence: Synthetic oligonucleotide"
  source: /note="BBa_K124002"
gtttcgaataaacacacataaacaaacaaa

SEQ ID NO: 736 - DNA, 30 bp, Artificial Sequence; identical to SEQ ID NO: 725
  source: /note="Description of Artificial Sequence: Synthetic oligonucleotide"
  source: /note="BBa_K319005"

SEQ ID NO: 737 - DNA, 30 bp, Artificial Sequence
  source: /note="Description of Artificial Sequence: Synthetic oligonucleotide"
  source: /note="BBa_M31201"
accatcaaaggaagctttaatcttctcata

SEQ ID NO: 738 - DNA, 30 bp, Artificial Sequence
  source: /note="Description of Artificial Sequence: Synthetic oligonucleotide"
  source: /note="BBa_I712004"
agaacccactgcttactggcttatcgaaat

SEQ ID NO: 739 - DNA, 30 bp, Artificial Sequence
  source: /note="Description of Artificial Sequence: Synthetic oligonucleotide"
  source: /note="BBa_K076017"
ggccgtttttggcttttttgttagacgaag

SEQ ID NO: 740 - DNA, 66 bp, Artificial Sequence
  source: /note="Description of Artificial Sequence: Synthetic oligonucleotide"
  source: /note="Plpp"
ataagtgccttcccatcaaaaaaatattctcaacataaaaaactttgtgtaatacttgtaacgcta

SEQ ID NO: 741 - DNA, 52 bp, Artificial Sequence
  source: /note="Description of Artificial Sequence: Synthetic oligonucleotide"
  source: /note="PapFAB46"
aaaaagagtattgacttcgcatctttttgtacctataatagattcattgcta

SEQ ID NO: 742 - DNA, 59 bp, Artificial Sequence
  source: /note="Description of Artificial Sequence: Synthetic oligonucleotide"
  source: /note="PJ23101+UP element"
ggaaaatttttttaaaaaaaaaactttacagctagctcagtcctaggtattatgctagc

SEQ ID NO: 743 - DNA, 59 bp, Artificial Sequence
  source: /note="Description of Artificial Sequence: Synthetic oligonucleotide"
  source: /note="PJ23107+UP element"
ggaaaatttttttaaaaaaaaaactttacggctagctcagccctaggtattatgctagc

SEQ ID NO: 744 - DNA, 64 bp, Artificial Sequence
  source: /note="Description of Artificial Sequence: Synthetic oligonucleotide"
  source: /note="PSYN23119"
ggaaaatttttttaaaaaaaaaacttgacagctagctcagtccttggtataatgctagcacgaa

SEQ ID NO: 745 - protein, 21 aa, Artificial Sequence
  source: /note="Description of Artificial Sequence: Synthetic peptide"
  source: /note="PhoA"
MKQSTIALALLPLLFTPVTKA

SEQ ID NO: 746 - protein, 20 aa, Artificial Sequence
  source: /note="Description of Artificial Sequence: Synthetic peptide"
  source: /note="PhoA"
KQSTIALALLPLLFTPVTKA

SEQ ID NO: 747 - protein, 22 aa, Artificial Sequence
  source: /note="Description of Artificial Sequence: Synthetic peptide"
  source: /note="OmpF"
MMKRNILAVIVPALLVAGTANA

SEQ ID NO: 748 - protein, 15 aa, Artificial Sequence
  source: /note="Description of Artificial Sequence: Synthetic peptide"
  source: /note="cvaC"
MRTLTLNELDSVSGG

SEQ ID NO: 749 - protein, 43 aa, Artificial Sequence
  source: /note="Description of Artificial Sequence: Synthetic polypeptide"
  source: /note="TorA"
MNNNDLFQASRRRFLAQLGGLTVAGMLGTSLLTPRRATAAQAA

SEQ ID NO: 750 - protein, 33 aa, Artificial Sequence
  source: /note="Description of Artificial Sequence: Synthetic polypeptide"
  source: /note="fdnG"
MDVSRRQFFKICAGGMAGTTVAALGFAPKQALA

SEQ ID NO: 751 - protein, 45 aa, Artificial Sequence
  source: /note="Description of Artificial Sequence: Synthetic polypeptide"
  source: /note="dmsA"
MKTKIPDAVLAAEVSRRGLVKTTAIGGLAMASSALTLPFSRIAHA

SEQ ID NO: 752 - protein, 21 aa, Artificial Sequence
  source: /note="Description of Artificial Sequence: Synthetic peptide"
  source: /note="PelB"
KYLLPTAAAGLLLLAAQPAMA

SEQ ID NO: 753 - protein, 52 aa, Artificial Sequence
  source: /note="Description of Artificial Sequence: Synthetic polypeptide"
  source: /note="HlyA secretion signal"
LNPLINEISKIISAAGNFDVKEERAAASLLQLSGNASDFSYGRNSITLTASA

SEQ ID NO: 754 - DNA, 159 bp, Artificial Sequence
  source: /note="Description of Artificial Sequence: Synthetic polynucleotide"
  source: /note="HlyA secretion signal"
cttaatccattaattaatgaaatcagcaaaatcatttcagctgcaggtaattttgatgttaaagaggaaagagctgcagcttctttattgcagttgtccggtaatgccagtgatttttcatatggacggaactcaataactttgacagcatcagcataa

SEQ ID NO: 755 - DNA, 355 bp, Artificial Sequence
  source: /note="Description of Artificial Sequence: Synthetic polynucleotide"
  source: /note="VH (10D1)"
caggtgcagctggtggagtctgggggaggcgtggtccagcctgggaggtccctgagactctcctgtgcagcctctggattcaccttcagtagctatactatgcactgggtccgccaggctccaggcaaggggctggagtgggtgacatttatatcatatgatggaaacaataaatactacgcagactccgtgaagggccgattcaccatctccagagacaattccaagaacacgctgtatctgcaaatgaacagcctgagagctgaggacacggctatatattactgtgcgaggaccggctggctggggccctttgactactggggccagggaaccctggtcaccgtctcctcag

SEQ ID NO: 756 - DNA, 325 bp, Artificial Sequence
  source: /note="Description of Artificial Sequence: Synthetic polynucleotide"
  source: /note="VL (10D1)"
gaaattgtgttgacgcagtctccaggcaccctgtctttgtctccaggggaaagagccaccctctcctgcagggccagtcagagtgttggcagcagctacttagcctggtaccagcagaaacctggccaggctcccaggctcctcatctatggtgcattcagcagggccactggcatcccagacaggttcagtggcagtgggtctgggacagacttcactctcaccatcagcagactggagcctgaagattttgcagtgtattactgtcagcagtatggtagctcaccgtggacgttcggccaagggaccaaggtggaaatcaaac

SEQ ID NO: 757 - DNA, 355 bp, Artificial Sequence
  source: /note="Description of Artificial Sequence: Synthetic polynucleotide"
  source: /note="VH (4B6)"
caggtgcagctggtggagtctgggggaggcgtggtccagcctgggaggtccctgagactctcctgtgcagcctctggattcaccttcagtagctatactatgcactgggtccgccaggctccaggcaaggggctggagtgggtgacatttatatcatatgatggaagcaataaacactacgcagactccgtgaagggccgattcaccgtctccagagacaattccaagaacacgctgtatctgcaaatgaacagcctgagagctgaggacacggctatatattactgtgcgaggaccggctggctggggccctttgactactggggccagggaaccctggtcaccgtctcctcag

SEQ ID NO: 758 - DNA, 325 bp, Artificial Sequence
  source: /note="Description of Artificial Sequence: Synthetic polynucleotide"
  source: /note="VL (4B6)"
gaaattgtgttgacgcagtctccaggcaccctgtctttgtctccaggggaaagagccaccctctcctgcagggccagtcagagtgttagcagcagcttcttagcctggtaccagcagaaacctggccaggctcccaggctcctcatctatggtgcatccagcagggccactggcatcccagacaggttcagtggcagtgggtctgggacagacttcactctcaccatcagcagactggagcctgaagattttgcagtgtattactgtcagcagtatggtagctcaccgtggacgttcggccaagggaccaaggtggaaatcaaac

SEQ ID NO: 759 - DNA, 358 bp, Artificial Sequence
  source: /note="Description of Artificial Sequence: Synthetic polynucleotide"
  source: /note="VH (1E2)"
caggtgcagctggtggagtctgggggaggcgtggtccagcctgggaggtccctgagactctcctgtgcagcgtctggattcaccttcagtagctatggcatgcactgggtccgccaggctccaggcaaggggctggagtgggtggcagttatatggtatgatggaagtaataaatactatgcagactccgtgaagggccgattcaccatctccagagacaattccaagaacacgctgtatctgcaaatgaacagcctgagagccgaggacacggctgtgttttactgtgcgagagctcccaattatattggtgcttttgatgtctggggccaagggacaatggtcaccgtctcttcag

SEQ ID NO: 760 - DNA, 322 bp, Artificial Sequence
  source: /note="Description of Artificial Sequence: Synthetic polynucleotide"
  source: /note="VL (1E2)"
gacatccagatgacccagtctccatcctcactgtctgcatctgtaggagacagagtcaccatcacttgtcgggcgagtcagggtattagcagctggttagcctggtatcagcagaaaccagagaaagcccctaagtccctgatctatgctgcatccagtttgcaaagtggggtcccatcaaggttcagcggcagtggatctgggacagatttcactctcaccatcagcagcctgcagcctgaagattttgcaacttattactgccaacagtataatagttaccctccgacgttcggccaagggaccaaggtggaaatcaaac

SEQ ID NO: 761 - protein, 451 aa, Artificial Sequence
  source: /note="Description of Artificial Sequence: Synthetic polypeptide"
  source: /note="Heavy chain (human monoclonal)"
QVQLVESGGGVVQPGRSLRLSCAASGFTFSSYGMHWVRQAPGKGLEWVAVIWYDGSNKYYADSVKGRFTISRDNSKNTLYLQMNSLRAEDTAVYYCARDPRGATLYYYYYGMDVWGQGTTVTVSSASTKGPSVFPLAPCSRSTSESTAALGCLVKDYFPEPVTVSWNSGALTSGVHTFPAVLQSSGLYSLSSVVTVPSSNFGTQTYTCNVDHKPSNTKVDKTVERKCCVECPPCPAPPVAGPSVFLFPPKPKDTLMISRTPEVTCVVVDVSHEDPEVQFNWYVDGVEVHNAKTKPREEQFNSTFRVVSVLTVVHQDWLNGKEYKCKVSNKGLPAPIEKTISKTKGQPREPQVYTLPPSREEMTKNQVSLTCLVKGFYPSDIAVEWESNGQPENNYKTTPPMLDSDGSFFLYSKLTVDKSRWQQGNVFSCSVMHEALHNHYTQKSLSLSPGK

SEQ ID NO: 762 - protein, 214 aa, Artificial Sequence; identical to SEQ ID NO: 10
  source: /note="Description of Artificial Sequence: Synthetic polypeptide"
  source: /note="Light chain (human monoclonal)"

SEQ ID NO: 763 - protein, 448 aa, Artificial Sequence; identical to SEQ ID NO: 5
  source: /note="Description of Artificial Sequence: Synthetic polypeptide"
  source: /note="Heavy chain (human monoclonal)"

SEQ ID NO: 764 - protein, 215 aa, Artificial Sequence; identical to SEQ ID NO: 7
  source: /note="Description of Artificial Sequence: Synthetic polypeptide"
  source: /note="Light chain (human monoclonal)"

SEQ ID NO: 765 - protein, 242 aa, Artificial Sequence
  source: /note="Description of Artificial Sequence: Synthetic polypeptide"
  source: /note="anti CTLA-4 scFv; Heavy Chain  linker  Light Chain Transcribed from the native FliC promoter and 5UTR (untranslated region) with an optimized ribosome binding site "
MQVQLVESGGGVVQPGRSLRLSCAASGFTFSSYTMHWVRQAPGKGLEWVTFISYDGNNKYYADSVKGRFTISRDNSKNTLYLQMNSLRAEDTAIYYCARTGWLGPFDYWGQGTLVTVSSGGGSGGGSGGGSGGGEIVLTQSPGTLSLSPGERATLSCRASQSVGSSYLAWYQQKPGQAPRLLIYGAFSRATGIPDRFSGSGSGTDFTLTISRLEPEDFAVYYCQQYGSSPWTFGQGTKVEIK

SEQ ID NO: 766 - DNA, 1103 bp, Artificial Sequence
  source: /note="Description of Artificial Sequence: Synthetic polynucleotide"
  source: /note="anti CTLA-4 scFv; Codon-optimized Heavy Chain  linker Light Chain Transcribed from the native FliC promoter and 5UTR (untranslated region) with an optimized ribosome binding site "
agcgggaataaggggcagagaaaagagtatttcgtcgactaacaaaaaatggctgtttgtgaaaaaaattctaaaggttgttttacgacagacgataacagggttgacggcgattgagccgacgggtggaaacccaaaacgtaatcaacaaataaaaatgaggaggcaattctaatgcaagtgcaactggtagagtccggtgggggcgtggtgcagccgggtcgcagcctgcgtctgtcgtgcgcggcgagtggttttacgttttcgagttatactatgcactgggttcgtcaagcgccgggcaaaggcctggaatgggttactttcatttcttacgatggtaataataaatattatgcggattctgtgaaaggtcgctttactatttcgcgcgataacagtaaaaacactctgtatctgcaaatgaattctctgcgtgcagaggatactgctatctattactgcgcgcgtacgggctggttgggcccgtttgattattggggccaaggcactttggttactgtgtcatcgggcgggggctctggcggtggttcaggtggtggcagtggtggtggcgagatcgtgttgactcaatctccgggtactctgtctctgtctccgggtgaacgcgcgaccctgtcttgccgcgcttctcagagtgttggttcatcgtatctggcatggtatcaacagaaaccgggtcaagcgccgcgtctgctgatttacggtgcttttagtcgcgcaaccgggattccggatcgattttctggttcaggttctggcactgactttactttgactattagtcgtctggaaccggaggacttcgcggtttattattgccaacagtatggttcttctccgtggacctttggtcaaggcactaaagttgaaattaaataatcgccgtaacctgattaactgagactgacggcaacgccaaattgcctgatgcgctgcgcttatcaggcctacaaggggaattgcaatttattgaatttgcacatttttgtaggccggataaggcgtttacgccgcatccggcaacatgaatggtaatttgccagcaacgtgcttccccgccaacggcggggttttttctg

SEQ ID NO: 767 - protein, 242 aa, Artificial Sequence
  source: /note="Description of Artificial Sequence: Synthetic polypeptide"
  source: /note="anti CTLA-4 scFv; Light Chain  linker  Heavy Chain Transcribed from the native FliC promoter and 5UTR (untranslated region) with an optimized ribosome binding site "
MEIVLTQSPGTLSLSPGERATLSCRASQSVGSSYLAWYQQKPGQAPRLLIYGAFSRATGIPDRFSGSGSGTDFTLTISRLEPEDFAVYYCQQYGSSPWTFGQGTKVEIKGGGSGGGSGGGSGGGQVQLVESGGGVVQPGRSLRLSCAASGFTFSSYTMHWVRQAPGKGLEWVTFISYDGNNKYYADSVKGRFTISRDNSKNTLYLQMNSLRAEDTAIYYCARTGWLGPFDYWGQGTLVTVSS

SEQ ID NO: 768 - DNA, 1103 bp, Artificial Sequence
  source: /note="Description of Artificial Sequence: Synthetic polynucleotide"
  source: /note="anti CTLA-4 scFv; Codon-optimized Light Chain  linker Heavy Chain Transcribed from the native FliC promoter and 5UTR (untranslated region) with an optimized ribosome binding site "
agcgggaataaggggcagagaaaagagtatttcgtcgactaacaaaaaatggctgtttgtgaaaaaaattctaaaggttgttttacgacagacgataacagggttgacggcgattgagccgacgggtggaaacccaaaacgtaatcaacagattataaggagttaaatagaaaaatggagattgtactgacccagagccctggtacattgtctttgtcgcctggtgaacgcgcgactctgtcttgtcgtgcgtctcagtctgttggtagttcgtatctggcgtggtatcaacaaaaaccgggccaagctccgcgtctgctgatttacggtgcatttagccgcgcgactggcattccggaccgcttttctgggtctggctcaggtaccgattttactctgactatttcgcgtctggagccggaggatttcgcggtttattactgccagcaatatggttctagtccgtggaccttcggccaaggtactaaagtggaaatcaaaggcgggggttcgggtggtggctctgggggtggctcgggcggtgggcaggtgcaactggttgagagtggtggcggcgttgttcaaccgggccgctctctgcgcctgtcgtgcgctgcttctggctttacctttagctcttatacgatgcactgggttcgccaagctccgggtaaaggtctggagtgggtgactttcatttcttacgatggtaacaacaaatattatgctgattctgttaaaggccgttttactatttctcgagacaatagcaaaaacactctgtacctgcagatgaattctctgcgcgctgaagacaccgcgatttattattgtgcgcgcactggttggctgggtccgtttgattattggggtcagggcacgctggttactgttagctcgtgatcgccgtaacctgattaactgagactgacggcaacgccaaattgcctgatgcgctgcgcttatcaggcctacaaggggaattgcaatttattgaatttgcacatttttgtaggccggataaggcgtttacgccgcatccggcaacatgaatggtaatttgccagcaacgtgcttccccgccaacggcggggttttttctg

SEQ ID NO: 769 - protein, 236 aa, Artificial Sequence
  source: /note="Description of Artificial Sequence: Synthetic polypeptide"
  source: /note="anti PD-1 scFv; Heavy Chain  linker  Light Chain Transcribed from the native FliC promoter and 5UTR (untranslated region) with an optimized ribosome binding site "
MQVQLVESGGGVVQPGRSLRLDCKASGITFSNSGMHWVRQAPGKGLEWVAVIWYDGSKRYYADSVKGRFTISRDNSKNTLFLQMNSLRAEDTAVYYCATNDDYWGQGTLVTVSSGGGSGGGSGGGSGGGEIVLTQSPATLSLSPGERATLSCRASQSVSSYLAWYQQKPGQAPRLLIYDASNRATGIPARFSGSGSGTDFTLTISSLEPEDFAVYYCQQSSNWPRTFGQGTKVEIK

SEQ ID NO: 770 - DNA, 1095 bp, Artificial Sequence
  source: /note="Description of Artificial Sequence: Synthetic polynucleotide"
  source: /note="anti PD-1 scFv; Codon-optimized Heavy Chain  linker Light Chain Transcribed from the native FliC promoter and 5UTR (untranslated region) with an optimized ribosome binding site "
agcgggaataaggggcagagaaaagagtatttcgtcgactaacaaaaaatggctgtttgtgaaaaaaattctaaaggttgttttacgacagacgataacagggttgacggcgattgagccgacgggtggaaacccaaaacgtaatcaacctcaaagaattataggaaaggaggaagcgataagtatgcaggtgcaattggtggagtcgggtggcggcgtggtgcaaccgggtcgtagcctgcgcctggattgtaaagcgtcaggcatcacgtttagcaattctggcatgcactgggtgcgtcaagcgccgggcaaaggtctggagtgggttgcggtaatttggtacgatggttctaaacgctattacgcggatagtgtgaaaggtcgctttactatctctcgcgataattctaaaaacaccctgtttctgcaaatgaattcgttgcgtgcggaagatactgcggtatattattgtgctactaacgatgattattggggtcaaggcaccctggtgactgtttcgagcggcggtggtagcggcggcggctctggtggtggttctggtggcggtgagattgtgctgactcaaagcccggcgaccctgtctctgtcgccgggtgaacgcgctactctgagttgccgtgcgtcgcaaagcgtgtcttcttatctggcgtggtaccaacaaaaaccgggtcaagcgccgcgcctgctgatatatgatgctagtaatcgtgcaacgggtattccggcacgcttttcaggttctggcagcggcaccgatttcactctgactatctcgtcactggagccggaagactttgcggtttattattgtcagcaatcttctaattggccgcgtacgtttggtcagggcactaaagttgaaatcaaataatcgccgtaacctgattaactgagactgacggcaacgccaaattgcctgatgcgctgcgcttatcaggcctacaaggggaattgcaatttattgaatttgcacatttttgtaggccggataaggcgtttacgccgcatccggcaacatgaatggtaatttgccagcaacgtgcttccccgccaacggcggggttttttctg

SEQ ID NO: 771 - protein, 236 aa, Artificial Sequence
  source: /note="Description of Artificial Sequence: Synthetic polypeptide"
  source: /note="anti PD-1 scFv; Light Chain  linker  Heavy Chain Transcribed from the native FliC promoter and 5UTR (untranslated region) with an optimized ribosome binding site "
MEIVLTQSPATLSLSPGERATLSCRASQSVSSYLAWYQQKPGQAPRLLIYDASNRATGIPARFSGSGSGTDFTLTISSLEPEDFAVYYCQQSSNWPRTFGQGTKVEIKGGGSGGGSGGGSGGGQVQLVESGGGVVQPGRSLRLDCKASGITFSNSGMHWVRQAPGKGLEWVAVIWYDGSKRYYADSVKGRFTISRDNSKNTLFLQMNSLRAEDTAVYYCATNDDYWGQGTLVTVSS

SEQ ID NO: 772 - DNA, 1085 bp, Artificial Sequence
  source: /note="Description of Artificial Sequence: Synthetic polynucleotide"
  source: /note="anti PD-1 scFv; Codon-optimized Light Chain  linker Heavy Chain Transcribed from the native FliC promoter and 5UTR (untranslated region) with an optimized ribosome binding site "
agcgggaataaggggcagagaaaagagtatttcgtcgactaacaaaaaatggctgtttgtgaaaaaaattctaaaggttgttttacgacagacgataacagggttgacggcgattgagccgacgggtggaaacccaaaacgtaatcaacatcaccaatttgaggaaaggtaaatatggaaatcgttttaacgcagtcgccggcgactctgtctttgtcgcctggtgaacgtgctacgctgtcttgccgcgcgtcacagtctgtgtcgtcatatctggcttggtaccaacagaaaccgggccaagctccgcgcctgctgatttatgatgcgtctaatcgcgcgaccggcattccggcgcgtttttctggctccggctctggcaccgactttactctgactatttcgtctctggaaccggaagattttgcggtgtactattgccagcaatcttctaattggccgcgcacgtttggtcaaggtaccaaggttgagatcaaaggtggtggctcgggcggcggttcgggcggcggctcaggtggtggccaagttcagttggttgagtctggcgggggcgtagtacaaccgggtcgttctttgcgtctggattgcaaagcgagcggtattacctttagcaattcaggtatgcactgggtgcgccaagcgccgggcaaaggcctggaatgggttgcggtgatttggtacgatggctcgaaacgttattatgctgacagcgttaaaggtcgttttactattagccgtgataattccaaaaatacgctgtttctgcagatgaatagcctgcgtgctgaagacactgcggtttattactgtgctactaatgatgattactggggccagggcaccctggtgactgtgagttcttaatcgccgtaacctgattaactgagactgacggcaacgccaaattgcctgatgcgctgcgcttatcaggcctacaaggggaattgcaatttattgaatttgcacatttttgtaggccggataaggcgtttacgccgcatccggcaacatgaatggtaatttgccagcaacgtgcttccccgccaacggcggggttttttctg

SEQ ID NO: 773 - protein, 242 aa, Artificial Sequence
  source: /note="Description of Artificial Sequence: Synthetic polypeptide"
  source: /note="anti PDL-1 scFv; Heavy Chain  linker  Light Chain Transcribed from the native FliC promoter and 5UTR (untranslated region) with an optimized ribosome binding site "
MEVQLVESGGGLVQPGGSLRLSCAASGFTFSDSWIHWVRQAPGKGLEWVAWISPYGGSTYYADSVKGRFTISADTSKNTAYLQMNSLRAEDTAVYYCARRHWPGGFDYWGQGTLVTVSSGGGSGGGSGGGSGGGDIQMTQSPSSLSASVGDRVTITCRASQDVSTAVAWYQQKPGKAPKLLIYSASFLYSGVPSRFSGSGSGTDFTLTISSLQPEDFATYYCQQYLYHPATFGQGTKVEIKR

SEQ ID NO: 774 - DNA, 1103 bp, Artificial Sequence
  source: /note="Description of Artificial Sequence: Synthetic polynucleotide"
  source: /note="anti PDL-1 scFv; Codon-optimized Heavy Chain  linker Light Chain Transcribed from the native FliC promoter and 5UTR (untranslated region) with an optimized ribosome binding site "
agcgggaataaggggcagagaaaagagtatttcgtcgactaacaaaaaatggctgtttgtgaaaaaaattctaaaggttgttttacgacagacgataacagggttgacggcgattgagccgacgggtggaaacccaaaacgtaatcaactacataattttggggagggtactcgatggaagttcagctggtggagagtggtggcggtctggtgcagccgggcggctctctgcgtctgagctgtgcggcgtctggctttacgttttctgacagttggattcactgggtgcgccaagcaccgggcaaaggcctggagtgggtggcgtggatttctccgtatggcggtagtacttattatgctgattctgtgaaaggccgttttaccatttcggcggacacttcaaaaaataccgcgtatctgcaaatgaatagcctgcgcgctgaagacacggctgtttactactgtgctcgccgccactggccgggcggtttcgattattggggccaaggcactctggtgactgtgagctctggcggcgggtcgggtggcggttctggcggtggcagtggcggtggtgatattcaaatgacccaatctccgtcgtctctgagcgcgtctgtgggcgatcgtgtaaccattacttgtcgtgcgtcgcaggatgtgtctactgctgtggcgtggtatcagcaaaaaccgggtaaagctccgaaactgctgatttatagcgcttcttttctgtatagtggtgttccgtcacgttttagcggttcaggctctggtactgatttcacactgactatttcttctctgcaaccggaagatttcgcgacttattattgtcagcagtacttgtaccacccggcaacttttggtcagggcactaaagttgaaattaaacgttaatcgccgtaacctgattaactgagactgacggcaacgccaaattgcctgatgcgctgcgcttatcaggcctacaaggggaattgcaatttattgaatttgcacatttttgtaggccggataaggcgtttacgccgcatccggcaacatgaatggtaatttgccagcaacgtgcttccccgccaacggcggggttttttctg

SEQ ID NO: 775 - protein, 242 aa, Artificial Sequence
  source: /note="Description of Artificial Sequence: Synthetic polypeptide"
  source: /note="anti PDL-1 scFv; Light Chain  linker  Heavy Chain Transcribed from the native FliC promoter and 5UTR (untranslated region) with an optimized ribosome binding site "
MDIQMTQSPSSLSASVGDRVTITCRASQDVSTAVAWYQQKPGKAPKLLIYSASFLYSGVPSRFSGSGSGTDFTLTISSLQPEDFATYYCQQYLYHPATFGQGTKVEIKRGGGSGGGSGGGSGGGEVQLVESGGGLVQPGGSLRLSCAASGFTFSDSWIHWVRQAPGKGLEWVAWISPYGGSTYYADSVKGRFTISADTSKNTAYLQMNSLRAEDTAVYYCARRHWPGGFDYWGQGTLVTVSS

SEQ ID NO: 776 - DNA, 1103 bp, Artificial Sequence
  source: /note="Description of Artificial Sequence: Synthetic polynucleotide"
  source: /note="anti PDL-1 scFv; Codon-optimized Light Chain  linker Heavy Chain Transcribed from the native FliC promoter and 5UTR (untranslated region) with an optimized ribosome binding site "
agcgggaataaggggcagagaaaagagtatttcgtcgactaacaaaaaatggctgtttgtgaaaaaaattctaaaggttgttttacgacagacgataacagggttgacggcgattgagccgacgggtggaaacccaaaacgtaatcaactggcagacgcctaaggaggaagaccatggatattcagatgactcagagccctagctcactgtctgcgtcagttggcgatcgtgtgactattacctgtcgcgctagtcaggatgtgtctacggcggttgcgtggtatcaacagaaaccgggcaaagctccgaaactgttgatttattcagcgtctttcctgtattcgggtgtgccttctcgcttttcgggctctggtagcggtactgattttacgctgactattagttcactgcaaccggaggactttgcgacttattattgccaacaatacctgtatcacccggcgacctttggtcaaggcactaaagtggaaattaaacgcggcggcggcagcggtggcggctctggtggtgggtctggtggtggtgaggttcagctggttgagtctggtggtggtctggttcaacctgggggcagcctgcgcctgtcgtgcgcggcgtctggttttacgttctcagattcttggattcactgggtacgtcaagctccgggcaaaggtctggagtgggtggcgtggatttctccgtatggcggttcgacgtattacgcggactctgttaaagggcgttttacgatctcagcggatacttctaaaaatactgcgtatctgcaaatgaattctctgcgagcggaggataccgcggtgtattactgtgctcgccgccactggcctggtggtttcgattattggggtcaaggtaccctggtgactgtttcgtcttaatcgccgtaacctgattaactgagactgacggcaacgccaaattgcctgatgcgctgcgcttatcaggcctacaaggggaattgcaatttattgaatttgcacatttttgtaggccggataaggcgtttacgccgcatccggcaacatgaatggtaatttgccagcaacgtgcttccccgccaacggcggggttttttctg

SEQ ID NO: 777 - protein, 606 aa, Artificial Sequence
  source: /note="Description of Artificial Sequence: Synthetic polypeptide"
  source: /note="anti CTLA-4 scFv"
MNKVYSLKYCPVTGGLIVVSELASRVIKKTCRRLTHILLAGIPAVYLYYPQISQAGIVRQVQLVESGGGVVQPGRSLRLSCAASGFTFSSYTMHWVRQAPGKGLEWVTFISYDGNNKYYADSVKGRFTISRDNSKNTLYLQMNSLRAEDTAIYYCARTGWLGPFDYWGQGTLVTVSSGGGSGGGSGGGSGGGEIVLTQSPGTLSLSPGERATLSCRASQSVGSSYLAWYQQKPGQAPRLLIYGAFSRATGIPDRFSGSGSGTDFTLTISRLEPEDFAVYYCQQYGSSPWTFGQGTKVEIKFKAEADKAAAAKADSFMNAGYKNFMTEVNNLNKRMGDLRDTNGDAGAWARIMSGAGSADGGYSDNYTHVQVGFDKKHELDGVDLFTGVTMTYTDSSADSHAFSGKTKSVGGGLYASALFESGAYIDLIGKYIHHDNDYTGNFAGLGTKHYNTHSWYAGAETGYRYHLTEETFIEPQAELVYGAVSGKTFRWKDGDMDLSMKNRDFSPLIGRTGIELGKTFSGKDWSVTARAGTSWQFDLLNNGETVLRDASGEKRIKGEKDSRMLFNVGMNAQIKDNMRFGLEFEKSAFGKYNVDNAVNANFRYMF

SEQ ID NO: 778 - DNA, 2038 bp, Artificial Sequence
  source: /note="Description of Artificial Sequence: Synthetic polynucleotide"
  source: /note="anti CTLA-4 scFv"
atctaatctagacatcattaattcctaatttttgttgacactctatcattgatagagttattttaccactccctatcagtgatagagaaaagtgaattaaatatcaactagaggtcaccaaatgaacaaagtatatagcctgaaatattgcccagtaactgggggtctgattgtagtcagtgaactggcatcccgcgtcatcaaaaaaacctgccgtcgtctgactcacatcctgctggcgggtattccggctgtgtatctgtactacccgcagatctcccaggcaggtatcgtccgccaggtacaattagttgagagcggcggcggtgtggttcaaccgggccgtagtctgcgattgtcttgtgctgcatctggttttactttcagttcttacacgatgcactgggttcgccaagctccgggcaaaggcctggagtgggttacctttatttcttacgatggcaataataagtattacgctgattctgtgaaaggtcgctttactattagccgagataactctaaaaatactctgtatctgcaaatgaattctctgcgtgcggaagatactgcgatctattattgtgcgcgtactggttggctgggcccgtttgattattggggccaaggcacgctggttactgttagttcgggcggcggttctggtggcggctctggtggtggctctggcggcggcgagattgtgctgactcaatctccgggcacgctgtcactgtctccgggtgaacgcgcgaccctgtcttgtcgcgcgagtcaaagtgttggttcttcttatctggcttggtatcagcaaaagcctggtcaagcgccgcgtctgttgatttatggcgcgttttcgcgcgcgactggcattccggaccgattttctggttctggttctggcactgatttcactctgaccatttcacgcctggaaccggaggattttgcggtgtactattgccaacaatatggctcatcgccgtggacgtttggccaaggtactaaagttgagattaaattcaaagcggaggctgacaaggccgctgcagcaaaagctgactcctttatgaacgcgggttacaaaaacttcatgaccgaggtaaataatctcaataaacgtatgggtgatctgcgcgacactaatggggatgcaggcgcatgggcacgcattatgtctggtgcaggttcggcggatggcgggtattctgacaattacactcatgttcaggtgggcttcgataaaaaacatgagctggacggtgtggatctgttcactggcgtaaccatgacttatactgattcaagcgcagacagccacgcattttcaggtaaaacgaaatcagttggcggcggtctgtatgcgagcgcactgttcgagagcggcgcctacattgatctaattggcaagtatattcaccatgataatgattacacagggaactttgcaggcctgggcaccaaacactataacacgcattcatggtacgctggcgcagaaaccggctatagataccacctgaccgaggaaacctttatcgaaccgcaagcggaactggtttacggtgcggtcagtggcaagacctttcgttggaaagatggtgatatggatctgtcaatgaaaaaccgcgacttcagccccttgatcggccgcaccggcattgagctgggcaaaaccttctctggcaaagattggtctgttaccgcgcgtgcgggcacttcgtggcaatttgatctgctaaacaacggtgagactgtactgcgtgatgcgagtggcgaaaaacgtattaaaggtgaaaaagatagtagaatgctattcaacgtgggcatgaatgcgcagatcaaagataacatgcgttttgggttggagtttgaaaaatccgcgttcggtaaatataatgttgacaatgctgtgaacgcgaatttccgctacatgttttaactctaacggacttgagtgaggttgtaaagggagttggctcctcggtaccaaattccagaaaagaggcctcccgaaaggggggccttttttcgtttt

SEQ ID NO: 779 - protein, 606 aa, Artificial Sequence
  source: /note="Description of Artificial Sequence: Synthetic polypeptide"
  source: /note="anti CTLA-4 scFv"
MNKVYSLKYCPVTGGLIVVSELASRVIKKTCRRLTHILLAGIPAVYLYYPQISQAGIVREIVLTQSPGTLSLSPGERATLSCRASQSVGSSYLAWYQQKPGQAPRLLIYGAFSRATGIPDRFSGSGSGTDFTLTISRLEPEDFAVYYCQQYGSSPWTFGQGTKVEIKGGGSGGGSGGGSGGGQVQLVESGGGVVQPGRSLRLSCAASGFTFSSYTMHWVRQAPGKGLEWVTFISYDGNNKYYADSVKGRFTISRDNSKNTLYLQMNSLRAEDTAIYYCARTGWLGPFDYWGQGTLVTVSSFKAEADKAAAAKADSFMNAGYKNFMTEVNNLNKRMGDLRDTNGDAGAWARIMSGAGSADGGYSDNYTHVQVGFDKKHELDGVDLFTGVTMTYTDSSADSHAFSGKTKSVGGGLYASALFESGAYIDLIGKYIHHDNDYTGNFAGLGTKHYNTHSWYAGAETGYRYHLTEETFIEPQAELVYGAVSGKTFRWKDGDMDLSMKNRDFSPLIGRTGIELGKTFSGKDWSVTARAGTSWQFDLLNNGETVLRDASGEKRIKGEKDSRMLFNVGMNAQIKDNMRFGLEFEKSAFGKYNVDNAVNANFRYMF

SEQ ID NO: 780 - DNA, 2038 bp, Artificial Sequence
  source: /note="Description of Artificial Sequence: Synthetic polynucleotide"
  source: /note="anti CTLA-4 scFv"
atctaatctagacatcattaattcctaatttttgttgacactctatcattgatagagttattttaccactccctatcagtgatagagaaaagtgaattaaatatcaactagaggtcaccaaatgaacaaagtatatagcctgaaatattgcccagtaactgggggtctgattgtagtcagtgaactggcatcccgcgtcatcaaaaaaacctgccgtcgtctgactcacatcctgctggcgggtattccggctgtgtatctgtactacccgcagatctcccaggcaggtatcgtccgcgaaattgtactgacccagtcgcctggtaccctgtctctgtcgccgggtgaacgtgctaccctgtcttgtcgtgcttcgcaatcggttggctcgtcttatctggcatggtatcagcaaaaaccgggccaagcgcctcgtctgctgatttatggcgcgttttctcgtgctacgggcattcctgatcgtttttcgggctctggctctggtactgattttacgctgactatcagccgcttggaacctgaagattttgcggtttattattgccaacaatatggctcttctccgtggacgtttggtcaaggcactaaagttgaaattaaaggtggtggctcgggcggtggttctggtggtggtagtggtggtggtcaagtgcagttggttgaatcgggtggcggtgttgtgcagccgggccgttcgttgcgtctgtcttgcgcagcgagtggtttcaccttctcttcttatactatgcactgggtgcgtcaagcacctggcaaaggtctggagtgggtaacttttatttcatacgatggtaataataaatattatgcagattctgttaaaggtcgctttacgatttctcgcgataattcaaaaaatacgctgtatctgcagatgaattcgctgcgcgctgaggatactgcgatctactattgtgcgcgtactggttggctgggtccgtttgattactggggccaaggtacgctggttacagtttcgtcgttcaaagcggaggctgacaaggccgctgcagcaaaagctgactcctttatgaacgcgggttacaaaaacttcatgaccgaggtaaataatctcaataaacgtatgggtgatctgcgcgacactaatggggatgcaggcgcatgggcacgcattatgtctggtgcaggttcggcggatggcgggtattctgacaattacactcatgttcaggtgggcttcgataaaaaacatgagctggacggtgtggatctgttcactggcgtaaccatgacttatactgattcaagcgcagacagccacgcattttcaggtaaaacgaaatcagttggcggcggtctgtatgcgagcgcactgttcgagagcggcgcctacattgatctaattggcaagtatattcaccatgataatgattacacagggaactttgcaggcctgggcaccaaacactataacacgcattcatggtacgctggcgcagaaaccggctatagataccacctgaccgaggaaacctttatcgaaccgcaagcggaactggtttacggtgcggtcagtggcaagacctttcgttggaaagatggtgatatggatctgtcaatgaaaaaccgcgacttcagccccttgatcggccgcaccggcattgagctgggcaaaaccttctctggcaaagattggtctgttaccgcgcgtgcgggcacttcgtggcaatttgatctgctaaacaacggtgagactgtactgcgtgatgcgagtggcgaaaaacgtattaaaggtgaaaaagatagtagaatgctattcaacgtgggcatgaatgcgcagatcaaagataacatgcgttttgggttggagtttgaaaaatccgcgttcggtaaatataatgttgacaatgctgtgaacgcgaatttccgctacatgttttaactctaacggacttgagtgaggttgtaaagggagttggctcctcggtaccaaattccagaaaagaggcctcccgaaaggggggccttttttcgtttt

SEQ ID NO: 781 - protein, 600 aa, Artificial Sequence
  source: /note="Description of Artificial Sequence: Synthetic polypeptide"
  source: /note="anti PD-1 scFv"
MNKVYSLKYCPVTGGLIVVSELASRVIKKTCRRLTHILLAGIPAVYLYYPQISQAGIVRQVQLVESGGGVVQPGRSLRLDCKASGITFSNSGMHWVRQAPGKGLEWVAVIWYDGSKRYYADSVKGRFTISRDNSKNTLFLQMNSLRAEDTAVYYCATNDDYWGQGTLVTVSSGGGSGGGSGGGSGGGEIVLTQSPATLSLSPGERATLSCRASQSVSSYLAWYQQKPGQAPRLLIYDASNRATGIPARFSGSGSGTDFTLTISSLEPEDFAVYYCQQSSNWPRTFGQGTKVEIKFKAEADKAAAAKADSFMNAGYKNFMTEVNNLNKRMGDLRDTNGDAGAWARIMSGAGSADGGYSDNYTHVQVGFDKKHELDGVDLFTGVTMTYTDSSADSHAFSGKTKSVGGGLYASALFESGAYIDLIGKYIHHDNDYTGNFAGLGTKHYNTHSWYAGAETGYRYHLTEETFIEPQAELVYGAVSGKTFRWKDGDMDLSMKNRDFSPLIGRTGIELGKTFSGKDWSVTARAGTSWQFDLLNNGETVLRDASGEKRIKGEKDSRMLFNVGMNAQIKDNMRFGLEFEKSAFGKYNVDNAVNANFRYMF

SEQ ID NO: 782 - DNA, 2020 bp, Artificial Sequence
  source: /note="Description of Artificial Sequence: Synthetic polynucleotide"
  source: /note="anti PD-1 scFv"
atctaatctagacatcattaattcctaatttttgttgacactctatcattgatagagttattttaccactccctatcagtgatagagaaaagtgaattaaatatcaactagaggtcaccaaatgaacaaagtatatagcctgaaatattgcccagtaactgggggtctgattgtagtcagtgaactggcatcccgcgtcatcaaaaaaacctgccgtcgtctgactcacatcctgctggcgggtattccggctgtgtatctgtactacccgcagatctcccaggcaggtatcgtccgccaagtacaactggttgaatccggcggaggagtggtgcaaccgggccgcagtttgcgtctggattgtaaagcttcaggcatcactttttctaattctggtatgcactgggttcgccaagctccgggtaaaggtctggagtgggttgcggtgatctggtatgatggttctaaacgatattatgcggatagtgttaagggtcgttttactatttctcgtgataattctaagaacaccttgtttctgcagatgaatagtctgcgcgctgaggatactgcggtatattattgtgcgactaatgacgattattggggccaaggcacgctggttaccgtgagctctggtggtggttcgggtggtggttctggtggtgggagcggcggtggcgagatcgttctgactcaaagcccggcgactctgagtctgagtccgggtgaacgtgcgactctgagctgccgtgcgtctcagagtgtgtcgagttatctggcgtggtaccaacaaaaaccgggccaggcgccgcgactgctgatttatgatgcttctaatcgtgcgactggtattccggcgcgctttagcggttctggctcaggcactgacttcactctgactatttcttcgctggaaccggaagattttgcggtgtactattgtcaacaatcatctaattggcctcgtacgttcggtcaaggtacaaaagtggagataaaattcaaagcggaggctgacaaggccgctgcagcaaaagctgactcctttatgaacgcgggttacaaaaacttcatgaccgaggtaaataatctcaataaacgtatgggtgatctgcgcgacactaatggggatgcaggcgcatgggcacgcattatgtctggtgcaggttcggcggatggcgggtattctgacaattacactcatgttcaggtgggcttcgataaaaaacatgagctggacggtgtggatctgttcactggcgtaaccatgacttatactgattcaagcgcagacagccacgcattttcaggtaaaacgaaatcagttggcggcggtctgtatgcgagcgcactgttcgagagcggcgcctacattgatctaattggcaagtatattcaccatgataatgattacacagggaactttgcaggcctgggcaccaaacactataacacgcattcatggtacgctggcgcagaaaccggctatagataccacctgaccgaggaaacctttatcgaaccgcaagcggaactggtttacggtgcggtcagtggcaagacctttcgttggaaagatggtgatatggatctgtcaatgaaaaaccgcgacttcagccccttgatcggccgcaccggcattgagctgggcaaaaccttctctggcaaagattggtctgttaccgcgcgtgcgggcacttcgtggcaatttgatctgctaaacaacggtgagactgtactgcgtgatgcgagtggcgaaaaacgtattaaaggtgaaaaagatagtagaatgctattcaacgtgggcatgaatgcgcagatcaaagataacatgcgttttgggttggagtttgaaaaatccgcgttcggtaaatataatgttgacaatgctgtgaacgcgaatttccgctacatgttttaactctaacggacttgagtgaggttgtaaagggagttggctcctcggtaccaaattccagaaaagaggcctcccgaaaggggggccttttttcgtttt

SEQ ID NO: 783 - protein, 600 aa, Artificial Sequence
  source: /note="Description of Artificial Sequence: Synthetic polypeptide"
  source: /note="anti PD-1 scFv"
MNKVYSLKYCPVTGGLIVVSELASRVIKKTCRRLTHILLAGIPAVYLYYPQISQAGIVREIVLTQSPATLSLSPGERATLSCRASQSVSSYLAWYQQKPGQAPRLLIYDASNRATGIPARFSGSGSGTDFTLTISSLEPEDFAVYYCQQSSNWPRTFGQGTKVEIKGGGSGGGSGGGSGGGQVQLVESGGGVVQPGRSLRLDCKASGITFSNSGMHWVRQAPGKGLEWVAVIWYDGSKRYYADSVKGRFTISRDNSKNTLFLQMNSLRAEDTAVYYCATNDDYWGQGTLVTVSSFKAEADKAAAAKADSFMNAGYKNFMTEVNNLNKRMGDLRDTNGDAGAWARIMSGAGSADGGYSDNYTHVQVGFDKKHELDGVDLFTGVTMTYTDSSADSHAFSGKTKSVGGGLYASALFESGAYIDLIGKYIHHDNDYTGNFAGLGTKHYNTHSWYAGAETGYRYHLTEETFIEPQAELVYGAVSGKTFRWKDGDMDLSMKNRDFSPLIGRTGIELGKTFSGKDWSVTARAGTSWQFDLLNNGETVLRDASGEKRIKGEKDSRMLFNVGMNAQIKDNMRFGLEFEKSAFGKYNVDNAVNANFRYMF

SEQ ID NO: 784 - DNA, 2020 bp, Artificial Sequence
  source: /note="Description of Artificial Sequence: Synthetic polynucleotide"
  source: /note="anti PD-1 scFv"
atctaatctagacatcattaattcctaatttttgttgacactctatcattgatagagttattttaccactccctatcagtgatagagaaaagtgaattaaatatcaactagaggtcaccaaatgaacaaagtatatagcctgaaatattgcccagtaactgggggtctgattgtagtcagtgaactggcatcccgcgtcatcaaaaaaacctgccgtcgtctgactcacatcctgctggcgggtattccggctgtgtatctgtactacccgcagatctcccaggcaggtatcgtccgcgaaatcgtgctgactcagagtccggcgactctgtctctgagtccgggcgaacgcgcgactctgtcttgccgtgcgtctcaatctgtgtcttcatacttggcttggtaccaacaaaaaccgggccaggcgccgcgactgttgatttatgatgcgtcgaatcgcgcgactggcattccggcgcgcttttcgggtagcggttctggtactgattttacgctgactatctcttctctggagcctgaagatttcgctgtttattactgccaacagtctagtaattggccgcgtactttcggccagggcactaaggtggaaattaaaggtggcggctcgggcggcggctcgggtggtggttctggtggtggccaagtgcaactggtggaaagtggcggcggggtggtgcaaccgggccgttctctgcgcctggattgtaaagcttcaggcattacttttagcaactctggtatgcactgggttcgccaagctccgggcaaaggcctggaatgggtggcggttatttggtacgatggctctaaacgttattacgctgacagtgttaaaggccgctttaccatttctcgtgataattctaaaaataccctgtttctgcaaatgaactcgctgcgcgcggaagatactgctgtttactattgtgcgactaatgatgattactggggtcaaggtaccctggttaccgtgtcttctttcaaagcggaggctgacaaggccgctgcagcaaaagctgactcctttatgaacgcgggttacaaaaacttcatgaccgaggtaaataatctcaataaacgtatgggtgatctgcgcgacactaatggggatgcaggcgcatgggcacgcattatgtctggtgcaggttcggcggatggcgggtattctgacaattacactcatgttcaggtgggcttcgataaaaaacatgagctggacggtgtggatctgttcactggcgtaaccatgacttatactgattcaagcgcagacagccacgcattttcaggtaaaacgaaatcagttggcggcggtctgtatgcgagcgcactgttcgagagcggcgcctacattgatctaattggcaagtatattcaccatgataatgattacacagggaactttgcaggcctgggcaccaaacactataacacgcattcatggtacgctggcgcagaaaccggctatagataccacctgaccgaggaaacctttatcgaaccgcaagcggaactggtttacggtgcggtcagtggcaagacctttcgttggaaagatggtgatatggatctgtcaatgaaaaaccgcgacttcagccccttgatcggccgcaccggcattgagctgggcaaaaccttctctggcaaagattggtctgttaccgcgcgtgcgggcacttcgtggcaatttgatctgctaaacaacggtgagactgtactgcgtgatgcgagtggcgaaaaacgtattaaaggtgaaaaagatagtagaatgctattcaacgtgggcatgaatgcgcagatcaaagataacatgcgttttgggttggagtttgaaaaatccgcgttcggtaaatataatgttgacaatgctgtgaacgcgaatttccgctacatgttttaactctaacggacttgagtgaggttgtaaagggagttggctcctcggtaccaaattccagaaaagaggcctcccgaaaggggggccttttttcgtttt

SEQ ID NO: 785 - protein, 606 aa, Artificial Sequence
  source: /note="Description of Artificial Sequence: Synthetic polypeptide"
  source: /note="anti PDL-1 scFv"
MNKVYSLKYCPVTGGLIVVSELASRVIKKTCRRLTHILLAGIPAVYLYYPQISQAGIVRDIQMTQSPSSLSASVGDRVTITCRASQDVSTAVAWYQQKPGKAPKLLIYSASFLYSGVPSRFSGSGSGTDFTLTISSLQPEDFATYYCQQYLYHPATFGQGTKVEIKRGGGSGGGSGGGSGGGEVQLVESGGGLVQPGGSLRLSCAASGFTFSDSWIHWVRQAPGKGLEWVAWISPYGGSTYYADSVKGRFTISADTSKNTAYLQMNSLRAEDTAVYYCARRHWPGGFDYWGQGTLVTVSSFKAEADKAAAAKADSFMNAGYKNFMTEVNNLNKRMGDLRDTNGDAGAWARIMSGAGSADGGYSDNYTHVQVGFDKKHELDGVDLFTGVTMTYTDSSADSHAFSGKTKSVGGGLYASALFESGAYIDLIGKYIHHDNDYTGNFAGLGTKHYNTHSWYAGAETGYRYHLTEETFIEPQAELVYGAVSGKTFRWKDGDMDLSMKNRDFSPLIGRTGIELGKTFSGKDWSVTARAGTSWQFDLLNNGETVLRDASGEKRIKGEKDSRMLFNVGMNAQIKDNMRFGLEFEKSAFGKYNVDNAVNANFRYMF

SEQ ID NO: 786 - DNA, 2038 bp, Artificial Sequence
  source: /note="Description of Artificial Sequence: Synthetic polynucleotide"
  source: /note="anti PDL-1 scFv"
atctaatctagacatcattaattcctaatttttgttgacactctatcattgatagagttattttaccactccctatcagtgatagagaaaagtgaattaaatatcaactagaggtcaccaaatgaacaaagtatatagcctgaaatattgcccagtaactgggggtctgattgtagtcagtgaactggcatcccgcgtcatcaaaaaaacctgccgtcgtctgactcacatcctgctggcgggtattccggctgtgtatctgtactacccgcagatctcccaggcaggtatcgtccgcgaagtgcagctggtggagtcaggtggaggcttggtgcaaccgggcggttcactgcgtctgtcatgtgcggcgtctgggtttacttttagtgactcttggattcactgggtgcgccaggctccgggtaaaggcctggaatgggtagcttggattagtccttacggtggctcgacctattatgctgattcggtaaagggtcgctttactattagcgctgatacttctaaaaatactgcatacctgcagatgaatagcctgcgcgctgaggatactgctgtgtattattgcgcgcgtcgccactggccgggcggctttgattattggggccaaggtactctggttaccgtgtctagtggcggtggtagcggcggcggctcaggtggcggctcgggcggtggcgacattcagatgactcagtctccgtcttctttgtcggcgagcgtgggcgatcgtgttaccatcacgtgtcgcgcgagccaagatgtgtcgactgcggtggcttggtatcaacaaaaaccgggtaaagctccgaaactgctgatttatagtgcgtcttttttgtattctggtgttccgtctcgtttctctggctcaggtagcggtactgattttacgctgactatttcttcactgcaaccggaagattttgctacgtattattgtcaacaatatctgtatcacccggcgacgtttggtcagggtactaaggtggagataaaacgcttcaaagcggaggctgacaaggccgctgcagcaaaagctgactcctttatgaacgcgggttacaaaaacttcatgaccgaggtaaataatctcaataaacgtatgggtgatctgcgcgacactaatggggatgcaggcgcatgggcacgcattatgtctggtgcaggttcggcggatggcgggtattctgacaattacactcatgttcaggtgggcttcgataaaaaacatgagctggacggtgtggatctgttcactggcgtaaccatgacttatactgattcaagcgcagacagccacgcattttcaggtaaaacgaaatcagttggcggcggtctgtatgcgagcgcactgttcgagagcggcgcctacattgatctaattggcaagtatattcaccatgataatgattacacagggaactttgcaggcctgggcaccaaacactataacacgcattcatggtacgctggcgcagaaaccggctatagataccacctgaccgaggaaacctttatcgaaccgcaagcggaactggtttacggtgcggtcagtggcaagacctttcgttggaaagatggtgatatggatctgtcaatgaaaaaccgcgacttcagccccttgatcggccgcaccggcattgagctgggcaaaaccttctctggcaaagattggtctgttaccgcgcgtgcgggcacttcgtggcaatttgatctgctaaacaacggtgagactgtactgcgtgatgcgagtggcgaaaaacgtattaaaggtgaaaaagatagtagaatgctattcaacgtgggcatgaatgcgcagatcaaagataacatgcgttttgggttggagtttgaaaaatccgcgttcggtaaatataatgttgacaatgctgtgaacgcgaatttccgctacatgttttaactctaacggacttgagtgaggttgtaaagggagttggctcctcggtaccaaattccagaaaagaggcctcccgaaaggggggccttttttcgtttt

SEQ ID NO: 787 - protein, 600 aa, Artificial Sequence; identical to SEQ ID NO: 783
  source: /note="Description of Artificial Sequence: Synthetic polypeptide"
  source: /note="anti PDL-1 scFv"

SEQ ID NO: 788 - DNA, 2038 bp, Artificial Sequence
  source: /note="Description of Artificial Sequence: Synthetic polynucleotide"
  source: /note="anti PDL-1 scFv"
atctaatctagacatcattaattcctaatttttgttgacactctatcattgatagagttattttaccactccctatcagtgatagagaaaagtgaattaaatatcaactagaggtcaccaaatgaacaaagtatatagcctgaaatattgcccagtaactgggggtctgattgtagtcagtgaactggcatcccgcgtcatcaaaaaaacctgccgtcgtctgactcacatcctgctggcgggtattccggctgtgtatctgtactacccgcagatctcccaggcaggtatcgtccgcgatattcaaatgactcaatctccgagctctctgagtgcgtctgtgggtgatcgtgtgactattacttgtcgtgcgtctcaagatgtttcaactgcggttgcgtggtatcaacagaaaccgggcaaggcgcctaagctgctgatttattctgcttcgttcctgtacagcggtgtgccgtctcgtttctctggctctggttcgggtactgatttcactctgactatttcgagtctgcagccggaagattttgcgacttattattgtcaacaatatctgtatcaccctgcgacgtttggtcaaggcacgaaagttgaaattaaacgtggtggtggctctggtggtggcagcggtggtgggtcgggtggcggtgaagttcaactggttgagtcaggtggtggcctggtgcaaccgggcggctctctgcgcctgtcttgtgctgcgtcgggttttacgttctctgatagctggattcactgggtacgccaggcaccgggcaaaggtctggaatgggtagcttggatttcaccttatggtggctctacttattacgcggatagcgtgaaaggtcgctttactatttctgcggacactagcaaaaatactgcttacctgcaaatgaattcgctgcgtgctgaggatactgcagtgtattactgtgcgcgtcgtcattggcctggcggctttgattattggggtcaaggtactctggttactgttagcagcttcaaagcggaggctgacaaggccgctgcagcaaaagctgactcctttatgaacgcgggttacaaaaacttcatgaccgaggtaaataatctcaataaacgtatgggtgatctgcgcgacactaatggggatgcaggcgcatgggcacgcattatgtctggtgcaggttcggcggatggcgggtattctgacaattacactcatgttcaggtgggcttcgataaaaaacatgagctggacggtgtggatctgttcactggcgtaaccatgacttatactgattcaagcgcagacagccacgcattttcaggtaaaacgaaatcagttggcggcggtctgtatgcgagcgcactgttcgagagcggcgcctacattgatctaattggcaagtatattcaccatgataatgattacacagggaactttgcaggcctgggcaccaaacactataacacgcattcatggtacgctggcgcagaaaccggctatagataccacctgaccgaggaaacctttatcgaaccgcaagcggaactggtttacggtgcggtcagtggcaagacctttcgttggaaagatggtgatatggatctgtcaatgaaaaaccgcgacttcagccccttgatcggccgcaccggcattgagctgggcaaaaccttctctggcaaagattggtctgttaccgcgcgtgcgggcacttcgtggcaatttgatctgctaaacaacggtgagactgtactgcgtgatgcgagtggcgaaaaacgtattaaaggtgaaaaagatagtagaatgctattcaacgtgggcatgaatgcgcagatcaaagataacatgcgttttgggttggagtttgaaaaatccgcgttcggtaaatataatgttgacaatgctgtgaacgcgaatttccgctacatgttttaactctaacggacttgagtgaggttgtaaagggagttggctcctcggtaccaaattccagaaaagaggcctcccgaaaggggggccttttttcgtttt

SEQ ID NO: 789 - protein, 294 aa, Artificial Sequence
  source: /note="Description of Artificial Sequence: Synthetic polypeptide"
  source: /note="anti CTLA-4 scFv"
MQVQLVESGGGVVQPGRSLRLSCAASGFTFSSYTMHWVRQAPGKGLEWVTFISYDGNNKYYADSVKGRFTISRDNSKNTLYLQMNSLRAEDTAIYYCARTGWLGPFDYWGQGTLVTVSSGGGSGGGSGGGSGGGEIVLTQSPGTLSLSPGERATLSCRASQSVGSSYLAWYQQKPGQAPRLLIYGAFSRATGIPDRFSGSGSGTDFTLTISRLEPEDFAVYYCQQYGSSPWTFGQGTKVEIKLNPLINEISKIISAAGNFDVKEERAAASLLQLSGNASDFSYGRNSITLTASA

SEQ ID NO: 790 - DNA, 5309 bp, Artificial Sequence
  source: /note="Description of Artificial Sequence: Synthetic polynucleotide"
  source: /note="anti CTLA-4 scFv"
gaattcgttaagacccactttcacatttaagttgtttttctaatccgcatatgatcaattcaaggccgaataagaaggctggctctgcaccttggtgatcaaataattcgatagcttgtcgtaataatggcggcatactatcagtagtaggtgtttccctttcttctttagcgacttgatgctcttgatcttccaatacgcaacctaaagtaaaatgccccacagcgctgagtgcatataatgcattctctagtgaaaaaccttgttggcataaaaaggctaattgattttcgagagtttcatactgtttttctgtaggccgtgtacctaaatgtacttttgctccatcgcgatgacttagtaaagcacatctaaaacttttagcgttattacgtaaaaaatcttgccagctttccccttctaaagggcaaaagtgagtatggtgcctatctaacatctcaatggctaaggcgtcgagcaaagcccgcttattttttacatgccaatacaatgtaggctgctctacacctagcttctgggcgagtttacgggttgttaaaccttcgattccgacctcattaagcagctctaatgcgctgttaatcactttacttttatctaatctagacatcattaattcctaatttttgttgacactctatcatttatagagttaatttaccactccctatcagtgatagagaaaagtgaatacgatttaattcggaggttttttgatgcaggtacaattagttgagagcggcggcggtgtggttcaaccgggccgtagtctgcgattgtcttgtgctgcatctggttttactttcagttcttacacgatgcactgggttcgccaagctccgggcaaaggcctggagtgggttacctttatttcttacgatggcaataataagtattacgctgattctgtgaaaggtcgctttactattagccgagataactctaaaaatactctgtatctgcaaatgaattctctgcgtgcggaagatactgcgatctattattgtgcgcgtactggttggctgggcccgtttgattattggggccaaggcacgctggttactgttagttcgggcggcggttctggtggcggctctggtggtggctctggcggcggcgagattgtgctgactcaatctccgggcacgctgtcactgtctccgggtgaacgcgcgaccctgtcttgtcgcgcgagtcaaagtgttggttcttcttatctggcttggtatcagcaaaagcctggtcaagcgccgcgtctgttgatttatggcgcgttttcgcgcgcgactggcattccggaccgattttctggttctggttctggcactgatttcactctgaccatttcacgcctggaaccggaggattttgcggtgtactattgccaacaatatggctcatcgccgtggacgtttggccaaggtactaaagttgagattaaacttaatccattaattaatgaaatcagcaaaatcatttcagctgcaggtaattttgatgttaaagaggaaagagctgcagcttctttattgcagttgtccggtaatgccagtgatttttcatatggacggaactcaataactttgacagcatcagcataatttattaatttaaataatagcaatcttactgggctgtgccacataagattgctatttttttggagtcataatggattcttgtcataaaattgattatgggttatacgccctggagattttagcccaataccataacgtctctgttaacccggaagaaattaaacatagatttgacacagacgggactggtctgggattaacgtcatggttgcttgctgcgaaatctttagaactaaaggtaaaacaggtaaaaaaaacaattgaccgattaaactttatttctttgcccgcattagtctggagagaggatggacgtcattttattctgactaaagtcagtaaagaagcaaacagatatcttatttttgatctggagcaacgaaatccccgtgttctcgaacagtctgagtttgaggcgttatatcaggggcatattattcttattgcttcccgttcttctgttaccgggaaactggcaaaatttgactttacctggtttatccctgccattataaaatacagaaaaatatttattgaaacccttgttgtatctgtttttttacaattatttgcattaataaccccccttttttttcaggtggttatggacaaagtattagtacacagggggttttcaacccttaatgttattactgtcgcattatctgttgtggtggtgtttgagattatactcagcggtttaagaacttacatttttgcacatagtacaagtcggattgatgttgagttgggtgccaaactcttccggcatttactggcgctaccgatctcttattttgagagtcgtcgtgttggtgatactgttgccagggtaagagaattagaccagatccgtaattttctgacaggacaggcattaacatctgttctggacttattattttcattcatattttttgcggtaatgtggtattacagcccaaagcttactctggtgatcttattttcgctgccctgttatgctgcatggtctgtttttattagccccattttgcgacgtcgccttgatgataagttttcacggaatgcggataatcaatctttcctggtggaatcagtcacggcgattaacactataaaagctatggcagtctcacctcagatgacgaacatatgggacaaacaattggcaggatatgttgctgcaggctttaaagtgacagtattagccaccattggtcaacaaggaatacagttaatacaaaagactgttatgatcatcaacctgtggttgggagcacacctggttatttccggggatttaagtattggtcagttaattgcttttaatatgcttgctggtcagattgttgcaccggttattcgccttgcacaaatctggcaggatttccagcaggttggtatatcagttacccgccttggtgatgtgcttaactctccaactgaaagttatcatgggaaactggcattaccggaaattaatggtaatatcacttttcgtaatatccggtttcgctataagcctgactctccggttattttagataatatcaatctcagtattaagcagggggaggttattggtattgtcggacgttctggttcaggaaaaagcacattaactaaattaattcaacgtttttatattcctgaaaatggccaggtcttaattgatggacatgatcttgcgttggccgatcctaactggttacgtcgtcaggtgggggttgtgttgcaggacaatgtgctgcttaatcgcagtattattgataatatctcactggctaatcctggtatgtccgtcgaaaaagttatttatgcagcgaaattagcaggcgctcatgattttatttctgaattgcgtgaggggtataacaccattgtcggggaacagggggcaggattatccggaggtcaacgtcaacgcatcgcaattgcaagggcgctggtgaacaaccctaaaatacttatttttgatgaagcaaccagtgctctggattatgagtcggagcatatcatcatgcgcaatatgcacaaaatatgtaagggcagaacggttataatcattgctcatcgtctgtctacagtaaaaaatgcagaccgcattattgtcatggaaaaagggaaaattgttgaacagggtaaacataaggaactgctttctgaaccggaaagtttatacagttacttatatcagttacagtcagactaacagaaagaacagaagaatatgaaaacatggttaatggggttcagcgagttcctgttgcgctataaacttgtctggagtgaaacatggaaaatccggaagcaattagatactccggtacgtgaaaaggacgaaaatgaattcttacccgctcatctggaattaattgaaacgccggtatccagacggccgcgtctggttgcttattttattatggggtttctggttattgctgtcattttatctgttttaggtcaggtggaaattgttgccactgcaaatgggaaattaacactaagtgggcgcagcaaagaaattaaacctattgaaaactcaatagttaaagaaattatcgtaaaagaaggagagtcagtccggaaaggggatgtgttattaaagcttacagcactgggagctgaagctgatacgttaaaaacacagtcatcactgttacagaccaggctggaacaaactcggtatcaaattctgagcaggtcaattgaattaaataaactacctgaactgaagcttcctgatgagccttattttcagaatgtatctgaagaggaagtactgcgtttaacttctttgataaaagaacagttttccacatggcaaaatcagaagtatcaaaaagaactgaatctggataagaaaagagcagagcgattaacaatacttgcccgtataaaccgttatgaaaatttatcgagagttgaaaaaagccgtctggatgatttcaggagtttattgcataaacaggcaattgcaaaacatgctgtacttgagcaggagaataaatatgtcgaggcagcaaatgaattacgggtttataaatcgcaactggagcaaattgagagtgagatattgtctgcaaaagaagaatatcagcttgtcacgcagctttttaaaaatgaaattttagacaagctaagacaaacaacagacaacattgagttattaactctggagttagagaaaaatgaagagcgtcaacaggcttcagtaatcagggcccctgtttcgggaaaagttcagcaactgaaggttcatactgaaggtggggttgttacaacagcggaaacactgatggtcatcgttccggaagatgacacgctggaggttactgctctggtacaaaataaagatattggttttattaacgtcgggcagaatgccatcattaaagtggaggcctttccttacacccgatatggttatctggtgggtaaggtgaaaaatataaatttagatgcaatagaagaccagaaactgggactcgtttttaatgtcattgtttctgttgaagagaatgatttgtcaaccgggaataagcacattccattaagctcgggtatggctgtcactgcagaaataaagactggaatgcgaagcgtaatcagctatcttcttagtcctctggaagagtctgtaacagaaagtttacatgagcgttaagtctcagagccgcggtatccggctcatatcttctcctg

SEQ ID NO: 791 - protein, 294 aa, Artificial Sequence
  source: /note="Description of Artificial Sequence: Synthetic polypeptide"
  source: /note="anti CTLA-4 scFv"
MEIVLTQSPGTLSLSPGERATLSCRASQSVGSSYLAWYQQKPGQAPRLLIYGAFSRATGIPDRFSGSGSGTDFTLTISRLEPEDFAVYYCQQYGSSPWTFGQGTKVEIKGGGSGGGSGGGSGGGQVQLVESGGGVVQPGRSLRLSCAASGFTFSSYTMHWVRQAPGKGLEWVTFISYDGNNKYYADSVKGRFTISRDNSKNTLYLQMNSLRAEDTAIYYCARTGWLGPFDYWGQGTLVTVSSLNPLINEISKIISAAGNFDVKEERAAASLLQLSGNASDFSYGRNSITLTASA

SEQ ID NO: 792 - DNA, 5309 bp, Artificial Sequence
  source: /note="Description of Artificial Sequence: Synthetic polynucleotide"
  source: /note="anti CTLA-4 scFv"
gaattcgttaagacccactttcacatttaagttgtttttctaatccgcatatgatcaattcaaggccgaataagaaggctggctctgcaccttggtgatcaaataattcgatagcttgtcgtaataatggcggcatactatcagtagtaggtgtttccctttcttctttagcgacttgatgctcttgatcttccaatacgcaacctaaagtaaaatgccccacagcgctgagtgcatataatgcattctctagtgaaaaaccttgttggcataaaaaggctaattgattttcgagagtttcatactgtttttctgtaggccgtgtacctaaatgtacttttgctccatcgcgatgacttagtaaagcacatctaaaacttttagcgttattacgtaaaaaatcttgccagctttccccttctaaagggcaaaagtgagtatggtgcctatctaacatctcaatggctaaggcgtcgagcaaagcccgcttattttttacatgccaatacaatgtaggctgctctacacctagcttctgggcgagtttacgggttgttaaaccttcgattccgacctcattaagcagctctaatgcgctgttaatcactttacttttatctaatctagacatcattaattcctaatttttgttgacactctatcatttatagagttaatttaccactccctatcagtgatagagaaaagtgaatcacaacgctgagagagagagaaatatggaaattgtactgacccagtcgcctggtaccctgtctctgtcgccgggtgaacgtgctaccctgtcttgtcgtgcttcgcaatcggttggctcgtcttatctggcatggtatcagcaaaaaccgggccaagcgcctcgtctgctgatttatggcgcgttttctcgtgctacgggcattcctgatcgtttttcgggctctggctctggtactgattttacgctgactatcagccgcttggaacctgaagattttgcggtttattattgccaacaatatggctcttctccgtggacgtttggtcaaggcactaaagttgaaattaaaggtggtggctcgggcggtggttctggtggtggtagtggtggtggtcaagtgcagttggttgaatcgggtggcggtgttgtgcagccgggccgttcgttgcgtctgtcttgcgcagcgagtggtttcaccttctcttcttatactatgcactgggtgcgtcaagcacctggcaaaggtctggagtgggtaacttttatttcatacgatggtaataataaatattatgcagattctgttaaaggtcgctttacgatttctcgcgataattcaaaaaatacgctgtatctgcagatgaattcgctgcgcgctgaggatactgcgatctactattgtgcgcgtactggttggctgggtccgtttgattactggggccaaggtacgctggttacagtttcgtcgcttaatccattaattaatgaaatcagcaaaatcatttcagctgcaggtaattttgatgttaaagaggaaagagctgcagcttctttattgcagttgtccggtaatgccagtgatttttcatatggacggaactcaataactttgacagcatcagcataatttattaatttaaataatagcaatcttactgggctgtgccacataagattgctatttttttggagtcataatggattcttgtcataaaattgattatgggttatacgccctggagattttagcccaataccataacgtctctgttaacccggaagaaattaaacatagatttgacacagacgggactggtctgggattaacgtcatggttgcttgctgcgaaatctttagaactaaaggtaaaacaggtaaaaaaaacaattgaccgattaaactttatttctttgcccgcattagtctggagagaggatggacgtcattttattctgactaaagtcagtaaagaagcaaacagatatcttatttttgatctggagcaacgaaatccccgtgttctcgaacagtctgagtttgaggcgttatatcaggggcatattattcttattgcttcccgttcttctgttaccgggaaactggcaaaatttgactttacctggtttatccctgccattataaaatacagaaaaatatttattgaaacccttgttgtatctgtttttttacaattatttgcattaataaccccccttttttttcaggtggttatggacaaagtattagtacacagggggttttcaacccttaatgttattactgtcgcattatctgttgtggtggtgtttgagattatactcagcggtttaagaacttacatttttgcacatagtacaagtcggattgatgttgagttgggtgccaaactcttccggcatttactggcgctaccgatctcttattttgagagtcgtcgtgttggtgatactgttgccagggtaagagaattagaccagatccgtaattttctgacaggacaggcattaacatctgttctggacttattattttcattcatattttttgcggtaatgtggtattacagcccaaagcttactctggtgatcttattttcgctgccctgttatgctgcatggtctgtttttattagccccattttgcgacgtcgccttgatgataagttttcacggaatgcggataatcaatctttcctggtggaatcagtcacggcgattaacactataaaagctatggcagtctcacctcagatgacgaacatatgggacaaacaattggcaggatatgttgctgcaggctttaaagtgacagtattagccaccattggtcaacaaggaatacagttaatacaaaagactgttatgatcatcaacctgtggttgggagcacacctggttatttccggggatttaagtattggtcagttaattgcttttaatatgcttgctggtcagattgttgcaccggttattcgccttgcacaaatctggcaggatttccagcaggttggtatatcagttacccgccttggtgatgtgcttaactctccaactgaaagttatcatgggaaactggcattaccggaaattaatggtaatatcacttttcgtaatatccggtttcgctataagcctgactctccggttattttagataatatcaatctcagtattaagcagggggaggttattggtattgtcggacgttctggttcaggaaaaagcacattaactaaattaattcaacgtttttatattcctgaaaatggccaggtcttaattgatggacatgatcttgcgttggccgatcctaactggttacgtcgtcaggtgggggttgtgttgcaggacaatgtgctgcttaatcgcagtattattgataatatctcactggctaatcctggtatgtccgtcgaaaaagttatttatgcagcgaaattagcaggcgctcatgattttatttctgaattgcgtgaggggtataacaccattgtcggggaacagggggcaggattatccggaggtcaacgtcaacgcatcgcaattgcaagggcgctggtgaacaaccctaaaatacttatttttgatgaagcaaccagtgctctggattatgagtcggagcatatcatcatgcgcaatatgcacaaaatatgtaagggcagaacggttataatcattgctcatcgtctgtctacagtaaaaaatgcagaccgcattattgtcatggaaaaagggaaaattgttgaacagggtaaacataaggaactgctttctgaaccggaaagtttatacagttacttatatcagttacagtcagactaacagaaagaacagaagaatatgaaaacatggttaatggggttcagcgagttcctgttgcgctataaacttgtctggagtgaaacatggaaaatccggaagcaattagatactccggtacgtgaaaaggacgaaaatgaattcttacccgctcatctggaattaattgaaacgccggtatccagacggccgcgtctggttgcttattttattatggggtttctggttattgctgtcattttatctgttttaggtcaggtggaaattgttgccactgcaaatgggaaattaacactaagtgggcgcagcaaagaaattaaacctattgaaaactcaatagttaaagaaattatcgtaaaagaaggagagtcagtccggaaaggggatgtgttattaaagcttacagcactgggagctgaagctgatacgttaaaaacacagtcatcactgttacagaccaggctggaacaaactcggtatcaaattctgagcaggtcaattgaattaaataaactacctgaactgaagcttcctgatgagccttattttcagaatgtatctgaagaggaagtactgcgtttaacttctttgataaaagaacagttttccacatggcaaaatcagaagtatcaaaaagaactgaatctggataagaaaagagcagagcgattaacaatacttgcccgtataaaccgttatgaaaatttatcgagagttgaaaaaagccgtctggatgatttcaggagtttattgcataaacaggcaattgcaaaacatgctgtacttgagcaggagaataaatatgtcgaggcagcaaatgaattacgggtttataaatcgcaactggagcaaattgagagtgagatattgtctgcaaaagaagaatatcagcttgtcacgcagctttttaaaaatgaaattttagacaagctaagacaaacaacagacaacattgagttattaactctggagttagagaaaaatgaagagcgtcaacaggcttcagtaatcagggcccctgtttcgggaaaagttcagcaactgaaggttcatactgaaggtggggttgttacaacagcggaaacactgatggtcatcgttccggaagatgacacgctggaggttactgctctggtacaaaataaagatattggttttattaacgtcgggcagaatgccatcattaaagtggaggcctttccttacacccgatatggttatctggtgggtaaggtgaaaaatataaatttagatgcaatagaagaccagaaactgggactcgtttttaatgtcattgtttctgttgaagagaatgatttgtcaaccgggaataagcacattccattaagctcgggtatggctgtcactgcagaaataaagactggaatgcgaagcgtaatcagctatcttcttagtcctctggaagagtctgtaacagaaagtttacatgagcgttaagtctcagagccgcggtatccggctcatatcttctcctg

SEQ ID NO: 793 - protein, 288 aa, Artificial Sequence
  source: /note="Description of Artificial Sequence: Synthetic polypeptide"
  source: /note="anti PD-1 scFv"
MQVQLVESGGGVVQPGRSLRLDCKASGITFSNSGMHWVRQAPGKGLEWVAVIWYDGSKRYYADSVKGRFTISRDNSKNTLFLQMNSLRAEDTAVYYCATNDDYWGQGTLVTVSSGGGSGGGSGGGSGGGEIVLTQSPATLSLSPGERATLSCRASQSVSSYLAWYQQKPGQAPRLLIYDASNRATGIPARFSGSGSGTDFTLTISSLEPEDFAVYYCQQSSNWPRTFGQGTKVEIKLNPLINEISKIISAAGNFDVKEERAAASLLQLSGNASDFSYGRNSITLTASA

SEQ ID NO: 794 - DNA, 5291 bp, Artificial Sequence
  source: /note="Description of Artificial Sequence: Synthetic polynucleotide"
  source: /note="anti PD-1 scFv"
gaattcgttaagacccactttcacatttaagttgtttttctaatccgcatatgatcaattcaaggccgaataagaaggctggctctgcaccttggtgatcaaataattcgatagcttgtcgtaataatggcggcatactatcagtagtaggtgtttccctttcttctttagcgacttgatgctcttgatcttccaatacgcaacctaaagtaaaatgccccacagcgctgagtgcatataatgcattctctagtgaaaaaccttgttggcataaaaaggctaattgattttcgagagtttcatactgtttttctgtaggccgtgtacctaaatgtacttttgctccatcgcgatgacttagtaaagcacatctaaaacttttagcgttattacgtaaaaaatcttgccagctttccccttctaaagggcaaaagtgagtatggtgcctatctaacatctcaatggctaaggcgtcgagcaaagcccgcttattttttacatgccaatacaatgtaggctgctctacacctagcttctgggcgagtttacgggttgttaaaccttcgattccgacctcattaagcagctctaatgcgctgttaatcactttacttttatctaatctagacatcattaattcctaatttttgttgacactctatcatttatagagttaatttaccactccctatcagtgatagagaaaagtgaagttaaattgaggaggaggcagttccatgcaagtacaactggttgaatccggcggaggagtggtgcaaccgggccgcagtttgcgtctggattgtaaagcttcaggcatcactttttctaattctggtatgcactgggttcgccaagctccgggtaaaggtctggagtgggttgcggtgatctggtatgatggttctaaacgatattatgcggatagtgttaagggtcgttttactatttctcgtgataattctaagaacaccttgtttctgcagatgaatagtctgcgcgctgaggatactgcggtatattattgtgcgactaatgacgattattggggccaaggcacgctggttaccgtgagctctggtggtggttcgggtggtggttctggtggtgggagcggcggtggcgagatcgttctgactcaaagcccggcgactctgagtctgagtccgggtgaacgtgcgactctgagctgccgtgcgtctcagagtgtgtcgagttatctggcgtggtaccaacaaaaaccgggccaggcgccgcgactgctgatttatgatgcttctaatcgtgcgactggtattccggcgcgctttagcggttctggctcaggcactgacttcactctgactatttcttcgctggaaccggaagattttgcggtgtactattgtcaacaatcatctaattggcctcgtacgttcggtcaaggtacaaaagtggagataaaacttaatccattaattaatgaaatcagcaaaatcatttcagctgcaggtaattttgatgttaaagaggaaagagctgcagcttctttattgcagttgtccggtaatgccagtgatttttcatatggacggaactcaataactttgacagcatcagcataatttattaatttaaataatagcaatcttactgggctgtgccacataagattgctatttttttggagtcataatggattcttgtcataaaattgattatgggttatacgccctggagattttagcccaataccataacgtctctgttaacccggaagaaattaaacatagatttgacacagacgggactggtctgggattaacgtcatggttgcttgctgcgaaatctttagaactaaaggtaaaacaggtaaaaaaaacaattgaccgattaaactttatttctttgcccgcattagtctggagagaggatggacgtcattttattctgactaaagtcagtaaagaagcaaacagatatcttatttttgatctggagcaacgaaatccccgtgttctcgaacagtctgagtttgaggcgttatatcaggggcatattattcttattgcttcccgttcttctgttaccgggaaactggcaaaatttgactttacctggtttatccctgccattataaaatacagaaaaatatttattgaaacccttgttgtatctgtttttttacaattatttgcattaataaccccccttttttttcaggtggttatggacaaagtattagtacacagggggttttcaacccttaatgttattactgtcgcattatctgttgtggtggtgtttgagattatactcagcggtttaagaacttacatttttgcacatagtacaagtcggattgatgttgagttgggtgccaaactcttccggcatttactggcgctaccgatctcttattttgagagtcgtcgtgttggtgatactgttgccagggtaagagaattagaccagatccgtaattttctgacaggacaggcattaacatctgttctggacttattattttcattcatattttttgcggtaatgtggtattacagcccaaagcttactctggtgatcttattttcgctgccctgttatgctgcatggtctgtttttattagccccattttgcgacgtcgccttgatgataagttttcacggaatgcggataatcaatctttcctggtggaatcagtcacggcgattaacactataaaagctatggcagtctcacctcagatgacgaacatatgggacaaacaattggcaggatatgttgctgcaggctttaaagtgacagtattagccaccattggtcaacaaggaatacagttaatacaaaagactgttatgatcatcaacctgtggttgggagcacacctggttatttccggggatttaagtattggtcagttaattgcttttaatatgcttgctggtcagattgttgcaccggttattcgccttgcacaaatctggcaggatttccagcaggttggtatatcagttacccgccttggtgatgtgcttaactctccaactgaaagttatcatgggaaactggcattaccggaaattaatggtaatatcacttttcgtaatatccggtttcgctataagcctgactctccggttattttagataatatcaatctcagtattaagcagggggaggttattggtattgtcggacgttctggttcaggaaaaagcacattaactaaattaattcaacgtttttatattcctgaaaatggccaggtcttaattgatggacatgatcttgcgttggccgatcctaactggttacgtcgtcaggtgggggttgtgttgcaggacaatgtgctgcttaatcgcagtattattgataatatctcactggctaatcctggtatgtccgtcgaaaaagttatttatgcagcgaaattagcaggcgctcatgattttatttctgaattgcgtgaggggtataacaccattgtcggggaacagggggcaggattatccggaggtcaacgtcaacgcatcgcaattgcaagggcgctggtgaacaaccctaaaatacttatttttgatgaagcaaccagtgctctggattatgagtcggagcatatcatcatgcgcaatatgcacaaaatatgtaagggcagaacggttataatcattgctcatcgtctgtctacagtaaaaaatgcagaccgcattattgtcatggaaaaagggaaaattgttgaacagggtaaacataaggaactgctttctgaaccggaaagtttatacagttacttatatcagttacagtcagactaacagaaagaacagaagaatatgaaaacatggttaatggggttcagcgagttcctgttgcgctataaacttgtctggagtgaaacatggaaaatccggaagcaattagatactccggtacgtgaaaaggacgaaaatgaattcttacccgctcatctggaattaattgaaacgccggtatccagacggccgcgtctggttgcttattttattatggggtttctggttattgctgtcattttatctgttttaggtcaggtggaaattgttgccactgcaaatgggaaattaacactaagtgggcgcagcaaagaaattaaacctattgaaaactcaatagttaaagaaattatcgtaaaagaaggagagtcagtccggaaaggggatgtgttattaaagcttacagcactgggagctgaagctgatacgttaaaaacacagtcatcactgttacagaccaggctggaacaaactcggtatcaaattctgagcaggtcaattgaattaaataaactacctgaactgaagcttcctgatgagccttattttcagaatgtatctgaagaggaagtactgcgtttaacttctttgataaaagaacagttttccacatggcaaaatcagaagtatcaaaaagaactgaatctggataagaaaagagcagagcgattaacaatacttgcccgtataaaccgttatgaaaatttatcgagagttgaaaaaagccgtctggatgatttcaggagtttattgcataaacaggcaattgcaaaacatgctgtacttgagcaggagaataaatatgtcgaggcagcaaatgaattacgggtttataaatcgcaactggagcaaattgagagtgagatattgtctgcaaaagaagaatatcagcttgtcacgcagctttttaaaaatgaaattttagacaagctaagacaaacaacagacaacattgagttattaactctggagttagagaaaaatgaagagcgtcaacaggcttcagtaatcagggcccctgtttcgggaaaagttcagcaactgaaggttcatactgaaggtggggttgttacaacagcggaaacactgatggtcatcgttccggaagatgacacgctggaggttactgctctggtacaaaataaagatattggttttattaacgtcgggcagaatgccatcattaaagtggaggcctttccttacacccgatatggttatctggtgggtaaggtgaaaaatataaatttagatgcaatagaagaccagaaactgggactcgtttttaatgtcattgtttctgttgaagagaatgatttgtcaaccgggaataagcacattccattaagctcgggtatggctgtcactgcagaaataaagactggaatgcgaagcgtaatcagctatcttcttagtcctctggaagagtctgtaacagaaagtttacatgagcgttaagtctcagagccgcggtatccggctcatatcttctcctg

SEQ ID NO: 795 - protein, 288 aa, Artificial Sequence
  source: /note="Description of Artificial Sequence: Synthetic polypeptide"
  source: /note="anti PD-1 scFv"
MEIVLTQSPATLSLSPGERATLSCRASQSVSSYLAWYQQKPGQAPRLLIYDASNRATGIPARFSGSGSGTDFTLTISSLEPEDFAVYYCQQSSNWPRTFGQGTKVEIKGGGSGGGSGGGSGGGQVQLVESGGGVVQPGRSLRLDCKASGITFSNSGMHWVRQAPGKGLEWVAVIWYDGSKRYYADSVKGRFTISRDNSKNTLFLQMNSLRAEDTAVYYCATNDDYWGQGTLVTVSSLNPLINEISKIISAAGNFDVKEERAAASLLQLSGNASDFSYGRNSITLTASA

SEQ ID NO: 796 - DNA, 5291 bp, Artificial Sequence
  source: /note="Description of Artificial Sequence: Synthetic polynucleotide"
  source: /note="anti PD-1 scFv"
gaattcgttaagacccactttcacatttaagttgtttttctaatccgcatatgatcaattcaaggccgaataagaaggctggctctgcaccttggtgatcaaataattcgatagcttgtcgtaataatggcggcatactatcagtagtaggtgtttccctttcttctttagcgacttgatgctcttgatcttccaatacgcaacctaaagtaaaatgccccacagcgctgagtgcatataatgcattctctagtgaaaaaccttgttggcataaaaaggctaattgattttcgagagtttcatactgtttttctgtaggccgtgtacctaaatgtacttttgctccatcgcgatgacttagtaaagcacatctaaaacttttagcgttattacgtaaaaaatcttgccagctttccccttctaaagggcaaaagtgagtatggtgcctatctaacatctcaatggctaaggcgtcgagcaaagcccgcttattttttacatgccaatacaatgtaggctgctctacacctagcttctgggcgagtttacgggttgttaaaccttcgattccgacctcattaagcagctctaatgcgctgttaatcactttacttttatctaatctagacatcattaattcctaatttttgttgacactctatcatttatagagttaatttaccactccctatcagtgatagagaaaagtgaatataccgaacgcttaaggaggctttatggaaatcgtgctgactcagagtccggcgactctgtctctgagtccgggcgaacgcgcgactctgtcttgccgtgcgtctcaatctgtgtcttcatacttggcttggtaccaacaaaaaccgggccaggcgccgcgactgttgatttatgatgcgtcgaatcgcgcgactggcattccggcgcgcttttcgggtagcggttctggtactgattttacgctgactatctcttctctggagcctgaagatttcgctgtttattactgccaacagtctagtaattggccgcgtactttcggccagggcactaaggtggaaattaaaggtggcggctcgggcggcggctcgggtggtggttctggtggtggccaagtgcaactggtggaaagtggcggcggggtggtgcaaccgggccgttctctgcgcctggattgtaaagcttcaggcattacttttagcaactctggtatgcactgggttcgccaagctccgggcaaaggcctggaatgggtggcggttatttggtacgatggctctaaacgttattacgctgacagtgttaaaggccgctttaccatttctcgtgataattctaaaaataccctgtttctgcaaatgaactcgctgcgcgcggaagatactgctgtttactattgtgcgactaatgatgattactggggtcaaggtaccctggttaccgtgtcttctcttaatccattaattaatgaaatcagcaaaatcatttcagctgcaggtaattttgatgttaaagaggaaagagctgcagcttctttattgcagttgtccggtaatgccagtgatttttcatatggacggaactcaataactttgacagcatcagcataatttattaatttaaataatagcaatcttactgggctgtgccacataagattgctatttttttggagtcataatggattcttgtcataaaattgattatgggttatacgccctggagattttagcccaataccataacgtctctgttaacccggaagaaattaaacatagatttgacacagacgggactggtctgggattaacgtcatggttgcttgctgcgaaatctttagaactaaaggtaaaacaggtaaaaaaaacaattgaccgattaaactttatttctttgcccgcattagtctggagagaggatggacgtcattttattctgactaaagtcagtaaagaagcaaacagatatcttatttttgatctggagcaacgaaatccccgtgttctcgaacagtctgagtttgaggcgttatatcaggggcatattattcttattgcttcccgttcttctgttaccgggaaactggcaaaatttgactttacctggtttatccctgccattataaaatacagaaaaatatttattgaaacccttgttgtatctgtttttttacaattatttgcattaataaccccccttttttttcaggtggttatggacaaagtattagtacacagggggttttcaacccttaatgttattactgtcgcattatctgttgtggtggtgtttgagattatactcagcggtttaagaacttacatttttgcacatagtacaagtcggattgatgttgagttgggtgccaaactcttccggcatttactggcgctaccgatctcttattttgagagtcgtcgtgttggtgatactgttgccagggtaagagaattagaccagatccgtaattttctgacaggacaggcattaacatctgttctggacttattattttcattcatattttttgcggtaatgtggtattacagcccaaagcttactctggtgatcttattttcgctgccctgttatgctgcatggtctgtttttattagccccattttgcgacgtcgccttgatgataagttttcacggaatgcggataatcaatctttcctggtggaatcagtcacggcgattaacactataaaagctatggcagtctcacctcagatgacgaacatatgggacaaacaattggcaggatatgttgctgcaggctttaaagtgacagtattagccaccattggtcaacaaggaatacagttaatacaaaagactgttatgatcatcaacctgtggttgggagcacacctggttatttccggggatttaagtattggtcagttaattgcttttaatatgcttgctggtcagattgttgcaccggttattcgccttgcacaaatctggcaggatttccagcaggttggtatatcagttacccgccttggtgatgtgcttaactctccaactgaaagttatcatgggaaactggcattaccggaaattaatggtaatatcacttttcgtaatatccggtttcgctataagcctgactctccggttattttagataatatcaatctcagtattaagcagggggaggttattggtattgtcggacgttctggttcaggaaaaagcacattaactaaattaattcaacgtttttatattcctgaaaatggccaggtcttaattgatggacatgatcttgcgttggccgatcctaactggttacgtcgtcaggtgggggttgtgttgcaggacaatgtgctgcttaatcgcagtattattgataatatctcactggctaatcctggtatgtccgtcgaaaaagttatttatgcagcgaaattagcaggcgctcatgattttatttctgaattgcgtgaggggtataacaccattgtcggggaacagggggcaggattatccggaggtcaacgtcaacgcatcgcaattgcaagggcgctggtgaacaaccctaaaatacttatttttgatgaagcaaccagtgctctggattatgagtcggagcatatcatcatgcgcaatatgcacaaaatatgtaagggcagaacggttataatcattgctcatcgtctgtctacagtaaaaaatgcagaccgcattattgtcatggaaaaagggaaaattgttgaacagggtaaacataaggaactgctttctgaaccggaaagtttatacagttacttatatcagttacagtcagactaacagaaagaacagaagaatatgaaaacatggttaatggggttcagcgagttcctgttgcgctataaacttgtctggagtgaaacatggaaaatccggaagcaattagatactccggtacgtgaaaaggacgaaaatgaattcttacccgctcatctggaattaattgaaacgccggtatccagacggccgcgtctggttgcttattttattatggggtttctggttattgctgtcattttatctgttttaggtcaggtggaaattgttgccactgcaaatgggaaattaacactaagtgggcgcagcaaagaaattaaacctattgaaaactcaatagttaaagaaattatcgtaaaagaaggagagtcagtccggaaaggggatgtgttattaaagcttacagcactgggagctgaagctgatacgttaaaaacacagtcatcactgttacagaccaggctggaacaaactcggtatcaaattctgagcaggtcaattgaattaaataaactacctgaactgaagcttcctgatgagccttattttcagaatgtatctgaagaggaagtactgcgtttaacttctttgataaaagaacagttttccacatggcaaaatcagaagtatcaaaaagaactgaatctggataagaaaagagcagagcgattaacaatacttgcccgtataaaccgttatgaaaatttatcgagagttgaaaaaagccgtctggatgatttcaggagtttattgcataaacaggcaattgcaaaacatgctgtacttgagcaggagaataaatatgtcgaggcagcaaatgaattacgggtttataaatcgcaactggagcaaattgagagtgagatattgtctgcaaaagaagaatatcagcttgtcacgcagctttttaaaaatgaaattttagacaagctaagacaaacaacagacaacattgagttattaactctggagttagagaaaaatgaagagcgtcaacaggcttcagtaatcagggcccctgtttcgggaaaagttcagcaactgaaggttcatactgaaggtggggttgttacaacagcggaaacactgatggtcatcgttccggaagatgacacgctggaggttactgctctggtacaaaataaagatattggttttattaacgtcgggcagaatgccatcattaaagtggaggcctttccttacacccgatatggttatctggtgggtaaggtgaaaaatataaatttagatgcaatagaagaccagaaactgggactcgtttttaatgtcattgtttctgttgaagagaatgatttgtcaaccgggaataagcacattccattaagctcgggtatggctgtcactgcagaaataaagactggaatgcgaagcgtaatcagctatcttcttagtcctctggaagagtctgtaacagaaagtttacatgagcgttaagtctcagagccgcggtatccggctcatatcttctcctg

SEQ ID NO: 797 - protein, 294 aa, Artificial Sequence
  source: /note="Description of Artificial Sequence: Synthetic polypeptide"
  source: /note="anti PDL-1 scFv"
MEVQLVESGGGLVQPGGSLRLSCAASGFTFSDSWIHWVRQAPGKGLEWVAWISPYGGSTYYADSVKGRFTISADTSKNTAYLQMNSLRAEDTAVYYCARRHWPGGFDYWGQGTLVTVSSGGGSGGGSGGGSGGGDIQMTQSPSSLSASVGDRVTITCRASQDVSTAVAWYQQKPGKAPKLLIYSASFLYSGVPSRFSGSGSGTDFTLTISSLQPEDFATYYCQQYLYHPATFGQGTKVEIKRLNPLINEISKIISAAGNFDVKEERAAASLLQLSGNASDFSYGRNSITLTASA

SEQ ID NO: 798 - DNA, 5309 bp, Artificial Sequence
  source: /note="Description of Artificial Sequence: Synthetic polynucleotide"
  source: /note="anti PDL-1 scFv"
gaattcgttaagacccactttcacatttaagttgtttttctaatccgcatatgatcaattcaaggccgaataagaaggctggctctgcaccttggtgatcaaataattcgatagcttgtcgtaataatggcggcatactatcagtagtaggtgtttccctttcttctttagcgacttgatgctcttgatcttccaatacgcaacctaaagtaaaatgccccacagcgctgagtgcatataatgcattctctagtgaaaaaccttgttggcataaaaaggctaattgattttcgagagtttcatactgtttttctgtaggccgtgtacctaaatgtacttttgctccatcgcgatgacttagtaaagcacatctaaaacttttagcgttattacgtaaaaaatcttgccagctttccccttctaaagggcaaaagtgagtatggtgcctatctaacatctcaatggctaaggcgtcgagcaaagcccgcttattttttacatgccaatacaatgtaggctgctctacacctagcttctgggcgagtttacgggttgttaaaccttcgattccgacctcattaagcagctctaatgcgctgttaatcactttacttttatctaatctagacatcattaattcctaatttttgttgacactctatcatttatagagttaatttaccactccctatcagtgatagagaaaagtgaagatagggaccaggtaaggaggatgaatggaagtgcagctggtggagtcaggtggaggcttggtgcaaccgggcggttcactgcgtctgtcatgtgcggcgtctgggtttacttttagtgactcttggattcactgggtgcgccaggctccgggtaaaggcctggaatgggtagcttggattagtccttacggtggctcgacctattatgctgattcggtaaagggtcgctttactattagcgctgatacttctaaaaatactgcatacctgcagatgaatagcctgcgcgctgaggatactgctgtgtattattgcgcgcgtcgccactggccgggcggctttgattattggggccaaggtactctggttaccgtgtctagtggcggtggtagcggcggcggctcaggtggcggctcgggcggtggcgacattcagatgactcagtctccgtcttctttgtcggcgagcgtgggcgatcgtgttaccatcacgtgtcgcgcgagccaagatgtgtcgactgcggtggcttggtatcaacaaaaaccgggtaaagctccgaaactgctgatttatagtgcgtcttttttgtattctggtgttccgtctcgtttctctggctcaggtagcggtactgattttacgctgactatttcttcactgcaaccggaagattttgctacgtattattgtcaacaatatctgtatcacccggcgacgtttggtcagggtactaaggtggagataaaacgccttaatccattaattaatgaaatcagcaaaatcatttcagctgcaggtaattttgatgttaaagaggaaagagctgcagcttctttattgcagttgtccggtaatgccagtgatttttcatatggacggaactcaataactttgacagcatcagcataatttattaatttaaataatagcaatcttactgggctgtgccacataagattgctatttttttggagtcataatggattcttgtcataaaattgattatgggttatacgccctggagattttagcccaataccataacgtctctgttaacccggaagaaattaaacatagatttgacacagacgggactggtctgggattaacgtcatggttgcttgctgcgaaatctttagaactaaaggtaaaacaggtaaaaaaaacaattgaccgattaaactttatttctttgcccgcattagtctggagagaggatggacgtcattttattctgactaaagtcagtaaagaagcaaacagatatcttatttttgatctggagcaacgaaatccccgtgttctcgaacagtctgagtttgaggcgttatatcaggggcatattattcttattgcttcccgttcttctgttaccgggaaactggcaaaatttgactttacctggtttatccctgccattataaaatacagaaaaatatttattgaaacccttgttgtatctgtttttttacaattatttgcattaataaccccccttttttttcaggtggttatggacaaagtattagtacacagggggttttcaacccttaatgttattactgtcgcattatctgttgtggtggtgtttgagattatactcagcggtttaagaacttacatttttgcacatagtacaagtcggattgatgttgagttgggtgccaaactcttccggcatttactggcgctaccgatctcttattttgagagtcgtcgtgttggtgatactgttgccagggtaagagaattagaccagatccgtaattttctgacaggacaggcattaacatctgttctggacttattattttcattcatattttttgcggtaatgtggtattacagcccaaagcttactctggtgatcttattttcgctgccctgttatgctgcatggtctgtttttattagccccattttgcgacgtcgccttgatgataagttttcacggaatgcggataatcaatctttcctggtggaatcagtcacggcgattaacactataaaagctatggcagtctcacctcagatgacgaacatatgggacaaacaattggcaggatatgttgctgcaggctttaaagtgacagtattagccaccattggtcaacaaggaatacagttaatacaaaagactgttatgatcatcaacctgtggttgggagcacacctggttatttccggggatttaagtattggtcagttaattgcttttaatatgcttgctggtcagattgttgcaccggttattcgccttgcacaaatctggcaggatttccagcaggttggtatatcagttacccgccttggtgatgtgcttaactctccaactgaaagttatcatgggaaactggcattaccggaaattaatggtaatatcacttttcgtaatatccggtttcgctataagcctgactctccggttattttagataatatcaatctcagtattaagcagggggaggttattggtattgtcggacgttctggttcaggaaaaagcacattaactaaattaattcaacgtttttatattcctgaaaatggccaggtcttaattgatggacatgatcttgcgttggccgatcctaactggttacgtcgtcaggtgggggttgtgttgcaggacaatgtgctgcttaatcgcagtattattgataatatctcactggctaatcctggtatgtccgtcgaaaaagttatttatgcagcgaaattagcaggcgctcatgattttatttctgaattgcgtgaggggtataacaccattgtcggggaacagggggcaggattatccggaggtcaacgtcaacgcatcgcaattgcaagggcgctggtgaacaaccctaaaatacttatttttgatgaagcaaccagtgctctggattatgagtcggagcatatcatcatgcgcaatatgcacaaaatatgtaagggcagaacggttataatcattgctcatcgtctgtctacagtaaaaaatgcagaccgcattattgtcatggaaaaagggaaaattgttgaacagggtaaacataaggaactgctttctgaaccggaaagtttatacagttacttatatcagttacagtcagactaacagaaagaacagaagaatatgaaaacatggttaatggggttcagcgagttcctgttgcgctataaacttgtctggagtgaaacatggaaaatccggaagcaattagatactccggtacgtgaaaaggacgaaaatgaattcttacccgctcatctggaattaattgaaacgccggtatccagacggccgcgtctggttgcttattttattatggggtttctggttattgctgtcattttatctgttttaggtcaggtggaaattgttgccactgcaaatgggaaattaacactaagtgggcgcagcaaagaaattaaacctattgaaaactcaatagttaaagaaattatcgtaaaagaaggagagtcagtccggaaaggggatgtgttattaaagcttacagcactgggagctgaagctgatacgttaaaaacacagtcatcactgttacagaccaggctggaacaaactcggtatcaaattctgagcaggtcaattgaattaaataaactacctgaactgaagcttcctgatgagccttattttcagaatgtatctgaagaggaagtactgcgtttaacttctttgataaaagaacagttttccacatggcaaaatcagaagtatcaaaaagaactgaatctggataagaaaagagcagagcgattaacaatacttgcccgtataaaccgttatgaaaatttatcgagagttgaaaaaagccgtctggatgatttcaggagtttattgcataaacaggcaattgcaaaacatgctgtacttgagcaggagaataaatatgtcgaggcagcaaatgaattacgggtttataaatcgcaactggagcaaattgagagtgagatattgtctgcaaaagaagaatatcagcttgtcacgcagctttttaaaaatgaaattttagacaagctaagacaaacaacagacaacattgagttattaactctggagttagagaaaaatgaagagcgtcaacaggcttcagtaatcagggcccctgtttcgggaaaagttcagcaactgaaggttcatactgaaggtggggttgttacaacagcggaaacactgatggtcatcgttccggaagatgacacgctggaggttactgctctggtacaaaataaagatattggttttattaacgtcgggcagaatgccatcattaaagtggaggcctttccttacacccgatatggttatctggtgggtaaggtgaaaaatataaatttagatgcaatagaagaccagaaactgggactcgtttttaatgtcattgtttctgttgaagagaatgatttgtcaaccgggaataagcacattccattaagctcgggtatggctgtcactgcagaaataaagactggaatgcgaagcgtaatcagctatcttcttagtcctctggaagagtctgtaacagaaagtttacatgagcgttaagtctcagagccgcggtatccggctcatatcttctcctg

SEQ ID NO: 799 - protein, 294 aa, Artificial Sequence
  source: /note="Description of Artificial Sequence: Synthetic polypeptide"
  source: /note="anti PDL-1 scFv"
MDIQMTQSPSSLSASVGDRVTITCRASQDVSTAVAWYQQKPGKAPKLLIYSASFLYSGVPSRFSGSGSGTDFTLTISSLQPEDFATYYCQQYLYHPATFGQGTKVEIKRGGGSGGGSGGGSGGGEVQLVESGGGLVQPGGSLRLSCAASGFTFSDSWIHWVRQAPGKGLEWVAWISPYGGSTYYADSVKGRFTISADTSKNTAYLQMNSLRAEDTAVYYCARRHWPGGFDYWGQGTLVTVSSLNPLINEISKIISAAGNFDVKEERAAASLLQLSGNASDFSYGRNSITLTASA

SEQ ID NO: 800 - DNA, 5309 bp, Artificial Sequence
  source: /note="Description of Artificial Sequence: Synthetic polynucleotide"
  source: /note="anti PDL-1 scFv"
gaattcgttaagacccactttcacatttaagttgtttttctaatccgcatatgatcaattcaaggccgaataagaaggctggctctgcaccttggtgatcaaataattcgatagcttgtcgtaataatggcggcatactatcagtagtaggtgtttccctttcttctttagcgacttgatgctcttgatcttccaatacgcaacctaaagtaaaatgccccacagcgctgagtgcatataatgcattctctagtgaaaaaccttgttggcataaaaaggctaattgattttcgagagtttcatactgtttttctgtaggccgtgtacctaaatgtacttttgctccatcgcgatgacttagtaaagcacatctaaaacttttagcgttattacgtaaaaaatcttgccagctttccccttctaaagggcaaaagtgagtatggtgcctatctaacatctcaatggctaaggcgtcgagcaaagcccgcttattttttacatgccaatacaatgtaggctgctctacacctagcttctgggcgagtttacgggttgttaaaccttcgattccgacctcattaagcagctctaatgcgctgttaatcactttacttttatctaatctagacatcattaattcctaatttttgttgacactctatcatttatagagttaatttaccactccctatcagtgatagagaaaagtgaaataaatcccttcatgaggaggtaagatggatattcaaatgactcaatctccgagctctctgagtgcgtctgtgggtgatcgtgtgactattacttgtcgtgcgtctcaagatgtttcaactgcggttgcgtggtatcaacagaaaccgggcaaggcgcctaagctgctgatttattctgcttcgttcctgtacagcggtgtgccgtctcgtttctctggctctggttcgggtactgatttcactctgactatttcgagtctgcagccggaagattttgcgacttattattgtcaacaatatctgtatcaccctgcgacgtttggtcaaggcacgaaagttgaaattaaacgtggtggtggctctggtggtggcagcggtggtgggtcgggtggcggtgaagttcaactggttgagtcaggtggtggcctggtgcaaccgggcggctctctgcgcctgtcttgtgctgcgtcgggttttacgttctctgatagctggattcactgggtacgccaggcaccgggcaaaggtctggaatgggtagcttggatttcaccttatggtggctctacttattacgcggatagcgtgaaaggtcgctttactatttctgcggacactagcaaaaatactgcttacctgcaaatgaattcgctgcgtgctgaggatactgcagtgtattactgtgcgcgtcgtcattggcctggcggctttgattattggggtcaaggtactctggttactgttagcagccttaatccattaattaatgaaatcagcaaaatcatttcagctgcaggtaattttgatgttaaagaggaaagagctgcagcttctttattgcagttgtccggtaatgccagtgatttttcatatggacggaactcaataactttgacagcatcagcataatttattaatttaaataatagcaatcttactgggctgtgccacataagattgctatttttttggagtcataatggattcttgtcataaaattgattatgggttatacgccctggagattttagcccaataccataacgtctctgttaacccggaagaaattaaacatagatttgacacagacgggactggtctgggattaacgtcatggttgcttgctgcgaaatctttagaactaaaggtaaaacaggtaaaaaaaacaattgaccgattaaactttatttctttgcccgcattagtctggagagaggatggacgtcattttattctgactaaagtcagtaaagaagcaaacagatatcttatttttgatctggagcaacgaaatccccgtgttctcgaacagtctgagtttgaggcgttatatcaggggcatattattcttattgcttcccgttcttctgttaccgggaaactggcaaaatttgactttacctggtttatccctgccattataaaatacagaaaaatatttattgaaacccttgttgtatctgtttttttacaattatttgcattaataaccccccttttttttcaggtggttatggacaaagtattagtacacagggggttttcaacccttaatgttattactgtcgcattatctgttgtggtggtgtttgagattatactcagcggtttaagaacttacatttttgcacatagtacaagtcggattgatgttgagttgggtgccaaactcttccggcatttactggcgctaccgatctcttattttgagagtcgtcgtgttggtgatactgttgccagggtaagagaattagaccagatccgtaattttctgacaggacaggcattaacatctgttctggacttattattttcattcatattttttgcggtaatgtggtattacagcccaaagcttactctggtgatcttattttcgctgccctgttatgctgcatggtctgtttttattagccccattttgcgacgtcgccttgatgataagttttcacggaatgcggataatcaatctttcctggtggaatcagtcacggcgattaacactataaaagctatggcagtctcacctcagatgacgaacatatgggacaaacaattggcaggatatgttgctgcaggctttaaagtgacagtattagccaccattggtcaacaaggaatacagttaatacaaaagactgttatgatcatcaacctgtggttgggagcacacctggttatttccggggatttaagtattggtcagttaattgcttttaatatgcttgctggtcagattgttgcaccggttattcgccttgcacaaatctggcaggatttccagcaggttggtatatcagttacccgccttggtgatgtgcttaactctccaactgaaagttatcatgggaaactggcattaccggaaattaatggtaatatcacttttcgtaatatccggtttcgctataagcctgactctccggttattttagataatatcaatctcagtattaagcagggggaggttattggtattgtcggacgttctggttcaggaaaaagcacattaactaaattaattcaacgtttttatattcctgaaaatggccaggtcttaattgatggacatgatcttgcgttggccgatcctaactggttacgtcgtcaggtgggggttgtgttgcaggacaatgtgctgcttaatcgcagtattattgataatatctcactggctaatcctggtatgtccgtcgaaaaagttatttatgcagcgaaattagcaggcgctcatgattttatttctgaattgcgtgaggggtataacaccattgtcggggaacagggggcaggattatccggaggtcaacgtcaacgcatcgcaattgcaagggcgctggtgaacaaccctaaaatacttatttttgatgaagcaaccagtgctctggattatgagtcggagcatatcatcatgcgcaatatgcacaaaatatgtaagggcagaacggttataatcattgctcatcgtctgtctacagtaaaaaatgcagaccgcattattgtcatggaaaaagggaaaattgttgaacagggtaaacataaggaactgctttctgaaccggaaagtttatacagttacttatatcagttacagtcagactaacagaaagaacagaagaatatgaaaacatggttaatggggttcagcgagttcctgttgcgctataaacttgtctggagtgaaacatggaaaatccggaagcaattagatactccggtacgtgaaaaggacgaaaatgaattcttacccgctcatctggaattaattgaaacgccggtatccagacggccgcgtctggttgcttattttattatggggtttctggttattgctgtcattttatctgttttaggtcaggtggaaattgttgccactgcaaatgggaaattaacactaagtgggcgcagcaaagaaattaaacctattgaaaactcaatagttaaagaaattatcgtaaaagaaggagagtcagtccggaaaggggatgtgttattaaagcttacagcactgggagctgaagctgatacgttaaaaacacagtcatcactgttacagaccaggctggaacaaactcggtatcaaattctgagcaggtcaattgaattaaataaactacctgaactgaagcttcctgatgagccttattttcagaatgtatctgaagaggaagtactgcgtttaacttctttgataaaagaacagttttccacatggcaaaatcagaagtatcaaaaagaactgaatctggataagaaaagagcagagcgattaacaatacttgcccgtataaaccgttatgaaaatttatcgagagttgaaaaaagccgtctggatgatttcaggagtttattgcataaacaggcaattgcaaaacatgctgtacttgagcaggagaataaatatgtcgaggcagcaaatgaattacgggtttataaatcgcaactggagcaaattgagagtgagatattgtctgcaaaagaagaatatcagcttgtcacgcagctttttaaaaatgaaattttagacaagctaagacaaacaacagacaacattgagttattaactctggagttagagaaaaatgaagagcgtcaacaggcttcagtaatcagggcccctgtttcgggaaaagttcagcaactgaaggttcatactgaaggtggggttgttacaacagcggaaacactgatggtcatcgttccggaagatgacacgctggaggttactgctctggtacaaaataaagatattggttttattaacgtcgggcagaatgccatcattaaagtggaggcctttccttacacccgatatggttatctggtgggtaaggtgaaaaatataaatttagatgcaatagaagaccagaaactgggactcgtttttaatgtcattgtttctgttgaagagaatgatttgtcaaccgggaataagcacattccattaagctcgggtatggctgtcactgcagaaataaagactggaatgcgaagcgtaatcagctatcttcttagtcctctggaagagtctgtaacagaaagtttacatgagcgttaagtctcagagccgcggtatccggctcatatcttctcctg

SEQ ID NO: 801 - DNA, 104 bp, Artificial Sequence
  source: /note="Description of Artificial Sequence: Synthetic polynucleotide"
  source: /note="fliC promoter"
agcgggaataaggggcagagaaaagagtatttcgtcgactaacaaaaaatggctgtttgtgaaaaaaattctaaaggttgttttacgacagacgataacagggt

SEQ ID NO: 802 - DNA, 45 bp, Artificial Sequence
  source: /note="Description of Artificial Sequence: Synthetic oligonucleotide"
  source: /note="fliC 5 untranslated region"
tgacggcgattgagccgacgggtggaaacccaaaacgtaatcaac

SEQ ID NO: 803 - DNA, 96 bp, Artificial Sequence
  source: /note="Description of Artificial Sequence: Synthetic oligonucleotide"
  source: /note="Tetracycline responsive promoter"
atctaatctagacatcattaattcctaatttttgttgacactctatcattgatagagttattttaccactccctatcagtgatagagaaaagtgaa

SEQ ID NO: 804 - DNA, 705 bp, Artificial Sequence
  source: /note="Description of Artificial Sequence: Synthetic polynucleotide"
  source: /note="Tetracycline responsive promoter"
gaattcgttaagacccactttcacatttaagttgtttttctaatccgcatatgatcaattcaaggccgaataagaaggctggctctgcaccttggtgatcaaataattcgatagcttgtcgtaataatggcggcatactatcagtagtaggtgtttccctttcttctttagcgacttgatgctcttgatcttccaatacgcaacctaaagtaaaatgccccacagcgctgagtgcatataatgcattctctagtgaaaaaccttgttggcataaaaaggctaattgattttcgagagtttcatactgtttttctgtaggccgtgtacctaaatgtacttttgctccatcgcgatgacttagtaaagcacatctaaaacttttagcgttattacgtaaaaaatcttgccagctttccccttctaaagggcaaaagtgagtatggtgcctatctaacatctcaatggctaaggcgtcgagcaaagcccgcttattttttacatgccaatacaatgtaggctgctctacacctagcttctgggcgagtttacgggttgttaaaccttcgattccgacctcattaagcagctctaatgcgctgttaatcactttacttttatctaatctagacatcattaattcctaatttttgttgacactctatcatttatagagttaatttaccactccctatcagtgatagagaa

SEQ ID NO: 805 - DNA, 25 bp, Artificial Sequence
  source: /note="Description of Artificial Sequence: Synthetic oligonucleotide"
  source: /note="Optimized ribosome binding site"
aaataaaaatgaggaggcaattcta

SEQ ID NO: 806 - DNA, 25 bp, Artificial Sequence
  source: /note="Description of Artificial Sequence: Synthetic oligonucleotide"
  source: /note="Optimized ribosome binding site"
agattataaggagttaaatagaaaa

SEQ ID NO: 807 - DNA, 35 bp, Artificial Sequence
  source: /note="Description of Artificial Sequence: Synthetic oligonucleotide"
  source: /note="Optimized ribosome binding site"
ctcaaagaattataggaaaggaggaagcgataagt

SEQ ID NO: 808 - DNA, 25 bp, Artificial Sequence
  source: /note="Description of Artificial Sequence: Synthetic oligonucleotide"
  source: /note="Optimized ribosome binding site"
atcaccaatttgaggaaaggtaaat

SEQ ID NO: 809 - DNA, 25 bp, Artificial Sequence
  source: /note="Description of Artificial Sequence: Synthetic oligonucleotide"
  source: /note="Optimized ribosome binding site"
tggcagacgcctaaggaggaagacc

SEQ ID NO: 810 - DNA, 25 bp, Artificial Sequence
  source: /note="Description of Artificial Sequence: Synthetic oligonucleotide"
  source: /note="Optimized ribosome binding site"
tacataattttggggagggtactcg

SEQ ID NO: 811 - DNA, 25 bp, Artificial Sequence
  source: /note="Description of Artificial Sequence: Synthetic oligonucleotide"
  source: /note="Optimized ribosome binding site"
ttaaatatcaactagaggtcaccaa

SEQ ID NO: 812 - DNA, 25 bp, Artificial Sequence
  source: /note="Description of Artificial Sequence: Synthetic oligonucleotide"
  source: /note="Optimized ribosome binding site"
tacgatttaattcggaggttttttg

SEQ ID NO: 813 - DNA, 25 bp, Artificial Sequence
  source: /note="Description of Artificial Sequence: Synthetic oligonucleotide"
  source: /note="Optimized ribosome binding site"
tcacaacgctgagagagagagaaat

SEQ ID NO: 814 - DNA, 25 bp, Artificial Sequence
  source: /note="Description of Artificial Sequence: Synthetic oligonucleotide"
  source: /note="Optimized ribosome binding site"
gttaaattgaggaggaggcagttcc

SEQ ID NO: 815 - DNA, 25 bp, Artificial Sequence
  source: /note="Description of Artificial Sequence: Synthetic oligonucleotide"
  source: /note="Optimized ribosome binding site"
tataccgaacgcttaaggaggcttt

SEQ ID NO: 816 - DNA, 25 bp, Artificial Sequence
  source: /note="Description of Artificial Sequence: Synthetic oligonucleotide"
  source: /note="Optimized ribosome binding site"
ataaatcccttcatgaggaggtaag

SEQ ID NO: 817 - DNA, 25 bp, Artificial Sequence
  source: /note="Description of Artificial Sequence: Synthetic oligonucleotide"
  source: /note="Optimized ribosome binding site"
gatagggaccaggtaaggaggatga

SEQ ID NO: 818 - DNA, 200 bp, Artificial Sequence
  source: /note="Description of Artificial Sequence: Synthetic polynucleotide"
  source: /note="Terminator sequence"
tcgccgtaacctgattaactgagactgacggcaacgccaaattgcctgatgcgctgcgcttatcaggcctacaaggggaattgcaatttattgaatttgcacatttttgtaggccggataaggcgtttacgccgcatccggcaacatgaatggtaatttgccagcaacgtgcttccccgccaacggcggggttttttctg

SEQ ID NO: 819 - DNA, 96 bp, Artificial Sequence
  source: /note="Description of Artificial Sequence: Synthetic oligonucleotide"
  source: /note="Terminator sequence"
ctctaacggacttgagtgaggttgtaaagggagttggctcctcggtaccaaattccagaaaagaggcctcccgaaaggggggccttttttcgtttt

SEQ ID NO: 820 - DNA, 38 bp, Artificial Sequence
  source: /note="Description of Artificial Sequence: Synthetic oligonucleotide"
  source: /note="Terminator sequence"
gtctcagagccgcggtatccggctcatatcttctcctg

SEQ ID NO: 821 - DNA, 177 bp, Artificial Sequence
  source: /note="Description of Artificial Sequence: Synthetic polynucleotide"
  source: /note="N terminal secretion tag for Type V auto-secreter secretion"
atgaacaaagtatatagcctgaaatattgcccagtaactgggggtctgattgtagtcagtgaactggcatcccgcgtcatcaaaaaaacctgccgtcgtctgactcacatcctgctggcgggtattccggctgtgtatctgtactacccgcagatctcccaggcaggtatcgtccgc

SEQ ID NO: 822 - DNA, 921 bp, Artificial Sequence
  source: /note="Description of Artificial Sequence: Synthetic polynucleotide"
  source: /note="C terminal secretion tag for Type V auto-secreter secretion"
ttcaaagcggaggctgacaaggccgctgcagcaaaagctgactcctttatgaacgcgggttacaaaaacttcatgaccgaggtaaataatctcaataaacgtatgggtgatctgcgcgacactaatggggatgcaggcgcatgggcacgcattatgtctggtgcaggttcggcggatggcgggtattctgacaattacactcatgttcaggtgggcttcgataaaaaacatgagctggacggtgtggatctgttcactggcgtaaccatgacttatactgattcaagcgcagacagccacgcattttcaggtaaaacgaaatcagttggcggcggtctgtatgcgagcgcactgttcgagagcggcgcctacattgatctaattggcaagtatattcaccatgataatgattacacagggaactttgcaggcctgggcaccaaacactataacacgcattcatggtacgctggcgcagaaaccggctatagataccacctgaccgaggaaacctttatcgaaccgcaagcggaactggtttacggtgcggtcagtggcaagacctttcgttggaaagatggtgatatggatctgtcaatgaaaaaccgcgacttcagccccttgatcggccgcaccggcattgagctgggcaaaaccttctctggcaaagattggtctgttaccgcgcgtgcgggcacttcgtggcaatttgatctgctaaacaacggtgagactgtactgcgtgatgcgagtggcgaaaaacgtattaaaggtgaaaaagatagtagaatgctattcaacgtgggcatgaatgcgcagatcaaagataacatgcgttttgggttggagtttgaaaaatccgcgttcggtaaatataatgttgacaatgctgtgaacgcgaatttccgctacatgttttaa

SEQ ID NO: 823 - DNA, 729 bp, Artificial Sequence
  source: /note="Description of Artificial Sequence: Synthetic polynucleotide"
  source: /note="Anti-CTLA-4 single chain antibody coding region (Heavy Chain linker Light Chain)"
atgcaagtgcaactggtagagtccggtgggggcgtggtgcagccgggtcgcagcctgcgtctgtcgtgcgcggcgagtggttttacgttttcgagttatactatgcactgggttcgtcaagcgccgggcaaaggcctggaatgggttactttcatttcttacgatggtaataataaatattatgcggattctgtgaaaggtcgctttactatttcgcgcgataacagtaaaaacactctgtatctgcaaatgaattctctgcgtgcagaggatactgctatctattactgcgcgcgtacgggctggttgggcccgtttgattattggggccaaggcactttggttactgtgtcatcgggcgggggctctggcggtggttcaggtggtggcagtggtggtggcgagatcgtgttgactcaatctccgggtactctgtctctgtctccgggtgaacgcgcgaccctgtcttgccgcgcttctcagagtgttggttcatcgtatctggcatggtatcaacagaaaccgggtcaagcgccgcgtctgctgatttacggtgcttttagtcgcgcaaccgggattccggatcgattttctggttcaggttctggcactgactttactttgactattagtcgtctggaaccggaggacttcgcggtttattattgccaacagtatggttcttctccgtggacctttggtcaaggcactaaagttgaaattaaataa

SEQ ID NO: 824 - DNA, 729 bp, Artificial Sequence
  source: /note="Description of Artificial Sequence: Synthetic polynucleotide"
  source: /note="Anti-CTLA-4 single chain antibody coding region (Light Chain linker Heavy Chain)"
atggagattgtactgacccagagccctggtacattgtctttgtcgcctggtgaacgcgcgactctgtcttgtcgtgcgtctcagtctgttggtagttcgtatctggcgtggtatcaacaaaaaccgggccaagctccgcgtctgctgatttacggtgcatttagccgcgcgactggcattccggaccgcttttctgggtctggctcaggtaccgattttactctgactatttcgcgtctggagccggaggatttcgcggtttattactgccagcaatatggttctagtccgtggaccttcggccaaggtactaaagtggaaatcaaaggcgggggttcgggtggtggctctgggggtggctcgggcggtgggcaggtgcaactggttgagagtggtggcggcgttgttcaaccgggccgctctctgcgcctgtcgtgcgctgcttctggctttacctttagctcttatacgatgcactgggttcgccaagctccgggtaaaggtctggagtgggtgactttcatttcttacgatggtaacaacaaatattatgctgattctgttaaaggccgttttactatttctcgagacaatagcaaaaacactctgtacctgcagatgaattctctgcgcgctgaagacaccgcgatttattattgtgcgcgcactggttggctgggtccgtttgattattggggtcagggcacgctggttactgttagctcgtga

SEQ ID NO: 825 - DNA, 711 bp, Artificial Sequence
  source: /note="Description of Artificial Sequence: Synthetic polynucleotide"
  source: /note="Anti-PD-1 single chain antibody coding region (Heavy Chain linker Light Chain)"
atgcaggtgcaattggtggagtcgggtggcggcgtggtgcaaccgggtcgtagcctgcgcctggattgtaaagcgtcaggcatcacgtttagcaattctggcatgcactgggtgcgtcaagcgccgggcaaaggtctggagtgggttgcggtaatttggtacgatggttctaaacgctattacgcggatagtgtgaaaggtcgctttactatctctcgcgataattctaaaaacaccctgtttctgcaaatgaattcgttgcgtgcggaagatactgcggtatattattgtgctactaacgatgattattggggtcaaggcaccctggtgactgtttcgagcggcggtggtagcggcggcggctctggtggtggttctggtggcggtgagattgtgctgactcaaagcccggcgaccctgtctctgtcgccgggtgaacgcgctactctgagttgccgtgcgtcgcaaagcgtgtcttcttatctggcgtggtaccaacaaaaaccgggtcaagcgccgcgcctgctgatatatgatgctagtaatcgtgcaacgggtattccggcacgcttttcaggttctggcagcggcaccgatttcactctgactatctcgtcactggagccggaagactttgcggtttattattgtcagcaatcttctaattggccgcgtacgtttggtcagggcactaaagttgaaatcaaataa

SEQ ID NO: 826 - DNA, 711 bp, Artificial Sequence
  source: /note="Description of Artificial Sequence: Synthetic polynucleotide"
  source: /note="Anti-PD-1 single chain antibody coding region (Light Chain linker Heavy Chain)"
atggaaatcgttttaacgcagtcgccggcgactctgtctttgtcgcctggtgaacgtgctacgctgtcttgccgcgcgtcacagtctgtgtcgtcatatctggcttggtaccaacagaaaccgggccaagctccgcgcctgctgatttatgatgcgtctaatcgcgcgaccggcattccggcgcgtttttctggctccggctctggcaccgactttactctgactatttcgtctctggaaccggaagattttgcggtgtactattgccagcaatcttctaattggccgcgcacgtttggtcaaggtaccaaggttgagatcaaaggtggtggctcgggcggcggttcgggcggcggctcaggtggtggccaagttcagttggttgagtctggcgggggcgtagtacaaccgggtcgttctttgcgtctggattgcaaagcgagcggtattacctttagcaattcaggtatgcactgggtgcgccaagcgccgggcaaaggcctggaatgggttgcggtgatttggtacgatggctcgaaacgttattatgctgacagcgttaaaggtcgttttactattagccgtgataattccaaaaatacgctgtttctgcagatgaatagcctgcgtgctgaagacactgcggtttattactgtgctactaatgatgattactggggccagggcaccctggtgactgtgagttcttaa

SEQ ID NO: 827 - DNA, 729 bp, Artificial Sequence
  source: /note="Description of Artificial Sequence: Synthetic polynucleotide"
  source: /note="Anti-PD-L1 single chain antibody coding region (Light Chain linker Heavy Chain)"
atggatattcagatgactcagagccctagctcactgtctgcgtcagttggcgatcgtgtgactattacctgtcgcgctagtcaggatgtgtctacggcggttgcgtggtatcaacagaaaccgggcaaagctccgaaactgttgatttattcagcgtctttcctgtattcgggtgtgccttctcgcttttcgggctctggtagcggtactgattttacgctgactattagttcactgcaaccggaggactttgcgacttattattgccaacaatacctgtatcacccggcgacctttggtcaaggcactaaagtggaaattaaacgcggcggcggcagcggtggcggctctggtggtgggtctggtggtggtgaggttcagctggttgagtctggtggtggtctggttcaacctgggggcagcctgcgcctgtcgtgcgcggcgtctggttttacgttctcagattcttggattcactgggtacgtcaagctccgggcaaaggtctggagtgggtggcgtggatttctccgtatggcggttcgacgtattacgcggactctgttaaagggcgttttacgatctcagcggatacttctaaaaatactgcgtatctgcaaatgaattctctgcgagcggaggataccgcggtgtattactgtgctcgccgccactggcctggtggtttcgattattggggtcaaggtaccctggtgactgtttcgtcttaa

SEQ ID NO: 828 - DNA, 729 bp, Artificial Sequence
  source: /note="Description of Artificial Sequence: Synthetic polynucleotide"
  source: /note="Anti-PD-L1 single chain antibody coding region (Heavy Chain linker Light Chain)"
atggaagttcagctggtggagagtggtggcggtctggtgcagccgggcggctctctgcgtctgagctgtgcggcgtctggctttacgttttctgacagttggattcactgggtgcgccaagcaccgggcaaaggcctggagtgggtggcgtggatttctccgtatggcggtagtacttattatgctgattctgtgaaaggccgttttaccatttcggcggacacttcaaaaaataccgcgtatctgcaaatgaatagcctgcgcgctgaagacacggctgtttactactgtgctcgccgccactggccgggcggtttcgattattggggccaaggcactctggtgactgtgagctctggcggcgggtcgggtggcggttctggcggtggcagtggcggtggtgatattcaaatgacccaatctccgtcgtctctgagcgcgtctgtgggcgatcgtgtaaccattacttgtcgtgcgtcgcaggatgtgtctactgctgtggcgtggtatcagcaaaaaccgggtaaagctccgaaactgctgatttatagcgcttcttttctgtatagtggtgttccgtcacgttttagcggttcaggctctggtactgatttcacactgactatttcttctctgcaaccggaagatttcgcgacttattattgtcagcagtacttgtaccacccggcaacttttggtcagggcactaaagttgaaattaaacgttaa

SEQ ID NO: 829 - DNA, 1821 bp, Artificial Sequence
  source: /note="Description of Artificial Sequence: Synthetic polynucleotide"
  source: /note="Anti-CTLA-4 single chain antibody coding region (Heavy Chain linker Light Chain) with N terminal and C terminal Secretion Tag for Type V auto-secreter"
atgaacaaagtatatagcctgaaatattgcccagtaactgggggtctgattgtagtcagtgaactggcatcccgcgtcatcaaaaaaacctgccgtcgtctgactcacatcctgctggcgggtattccggctgtgtatctgtactacccgcagatctcccaggcaggtatcgtccgccaggtacaattagttgagagcggcggcggtgtggttcaaccgggccgtagtctgcgattgtcttgtgctgcatctggttttactttcagttcttacacgatgcactgggttcgccaagctccgggcaaaggcctggagtgggttacctttatttcttacgatggcaataataagtattacgctgattctgtgaaaggtcgctttactattagccgagataactctaaaaatactctgtatctgcaaatgaattctctgcgtgcggaagatactgcgatctattattgtgcgcgtactggttggctgggcccgtttgattattggggccaaggcacgctggttactgttagttcgggcggcggttctggtggcggctctggtggtggctctggcggcggcgagattgtgctgactcaatctccgggcacgctgtcactgtctccgggtgaacgcgcgaccctgtcttgtcgcgcgagtcaaagtgttggttcttcttatctggcttggtatcagcaaaagcctggtcaagcgccgcgtctgttgatttatggcgcgttttcgcgcgcgactggcattccggaccgattttctggttctggttctggcactgatttcactctgaccatttcacgcctggaaccggaggattttgcggtgtactattgccaacaatatggctcatcgccgtggacgtttggccaaggtactaaagttgagattaaattcaaagcggaggctgacaaggccgctgcagcaaaagctgactcctttatgaacgcgggttacaaaaacttcatgaccgaggtaaataatctcaataaacgtatgggtgatctgcgcgacactaatggggatgcaggcgcatgggcacgcattatgtctggtgcaggttcggcggatggcgggtattctgacaattacactcatgttcaggtgggcttcgataaaaaacatgagctggacggtgtggatctgttcactggcgtaaccatgacttatactgattcaagcgcagacagccacgcattttcaggtaaaacgaaatcagttggcggcggtctgtatgcgagcgcactgttcgagagcggcgcctacattgatctaattggcaagtatattcaccatgataatgattacacagggaactttgcaggcctgggcaccaaacactataacacgcattcatggtacgctggcgcagaaaccggctatagataccacctgaccgaggaaacctttatcgaaccgcaagcggaactggtttacggtgcggtcagtggcaagacctttcgttggaaagatggtgatatggatctgtcaatgaaaaaccgcgacttcagccccttgatcggccgcaccggcattgagctgggcaaaaccttctctggcaaagattggtctgttaccgcgcgtgcgggcacttcgtggcaatttgatctgctaaacaacggtgagactgtactgcgtgatgcgagtggcgaaaaacgtattaaaggtgaaaaagatagtagaatgctattcaacgtgggcatgaatgcgcagatcaaagataacatgcgttttgggttggagtttgaaaaatccgcgttcggtaaatataatgttgacaatgctgtgaacgcgaatttccgctacatgttttaa

SEQ ID NO: 830 - DNA, 1821 bp, Artificial Sequence
  source: /note="Description of Artificial Sequence: Synthetic polynucleotide"
  source: /note="Anti-CTLA-4 single chain antibody coding region (Light Chain linker Heavy Chain) with N terminal and C terminal Secretion Tag for Type V auto-secreter"
atgaacaaagtatatagcctgaaatattgcccagtaactgggggtctgattgtagtcagtgaactggcatcccgcgtcatcaaaaaaacctgccgtcgtctgactcacatcctgctggcgggtattccggctgtgtatctgtactacccgcagatctcccaggcaggtatcgtccgcgaaattgtactgacccagtcgcctggtaccctgtctctgtcgccgggtgaacgtgctaccctgtcttgtcgtgcttcgcaatcggttggctcgtcttatctggcatggtatcagcaaaaaccgggccaagcgcctcgtctgctgatttatggcgcgttttctcgtgctacgggcattcctgatcgtttttcgggctctggctctggtactgattttacgctgactatcagccgcttggaacctgaagattttgcggtttattattgccaacaatatggctcttctccgtggacgtttggtcaaggcactaaagttgaaattaaaggtggtggctcgggcggtggttctggtggtggtagtggtggtggtcaagtgcagttggttgaatcgggtggcggtgttgtgcagccgggccgttcgttgcgtctgtcttgcgcagcgagtggtttcaccttctcttcttatactatgcactgggtgcgtcaagcacctggcaaaggtctggagtgggtaacttttatttcatacgatggtaataataaatattatgcagattctgttaaaggtcgctttacgatttctcgcgataattcaaaaaatacgctgtatctgcagatgaattcgctgcgcgctgaggatactgcgatctactattgtgcgcgtactggttggctgggtccgtttgattactggggccaaggtacgctggttacagtttcgtcgttcaaagcggaggctgacaaggccgctgcagcaaaagctgactcctttatgaacgcgggttacaaaaacttcatgaccgaggtaaataatctcaataaacgtatgggtgatctgcgcgacactaatggggatgcaggcgcatgggcacgcattatgtctggtgcaggttcggcggatggcgggtattctgacaattacactcatgttcaggtgggcttcgataaaaaacatgagctggacggtgtggatctgttcactggcgtaaccatgacttatactgattcaagcgcagacagccacgcattttcaggtaaaacgaaatcagttggcggcggtctgtatgcgagcgcactgttcgagagcggcgcctacattgatctaattggcaagtatattcaccatgataatgattacacagggaactttgcaggcctgggcaccaaacactataacacgcattcatggtacgctggcgcagaaaccggctatagataccacctgaccgaggaaacctttatcgaaccgcaagcggaactggtttacggtgcggtcagtggcaagacctttcgttggaaagatggtgatatggatctgtcaatgaaaaaccgcgacttcagccccttgatcggccgcaccggcattgagctgggcaaaaccttctctggcaaagattggtctgttaccgcgcgtgcgggcacttcgtggcaatttgatctgctaaacaacggtgagactgtactgcgtgatgcgagtggcgaaaaacgtattaaaggtgaaaaagatagtagaatgctattcaacgtgggcatgaatgcgcagatcaaagataacatgcgttttgggttggagtttgaaaaatccgcgttcggtaaatataatgttgacaatgctgtgaacgcgaatttccgctacatgttttaa

SEQ ID NO: 831 - DNA, 1803 bp, Artificial Sequence
  source: /note="Description of Artificial Sequence: Synthetic polynucleotide"
  source: /note="Anti-PD-1 single chain antibody coding region (Heavy Chain linker  Light Chain) with N terminal and C terminal Secretion Tag for Type V auto-secreter"
atgaacaaagtatatagcctgaaatattgcccagtaactgggggtctgattgtagtcagtgaactggcatcccgcgtcatcaaaaaaacctgccgtcgtctgactcacatcctgctggcgggtattccggctgtgtatctgtactacccgcagatctcccaggcaggtatcgtccgccaagtacaactggttgaatccggcggaggagtggtgcaaccgggccgcagtttgcgtctggattgtaaagcttcaggcatcactttttctaattctggtatgcactgggttcgccaagctccgggtaaaggtctggagtgggttgcggtgatctggtatgatggttctaaacgatattatgcggatagtgttaagggtcgttttactatttctcgtgataattctaagaacaccttgtttctgcagatgaatagtctgcgcgctgaggatactgcggtatattattgtgcgactaatgacgattattggggccaaggcacgctggttaccgtgagctctggtggtggttcgggtggtggttctggtggtgggagcggcggtggcgagatcgttctgactcaaagcccggcgactctgagtctgagtccgggtgaacgtgcgactctgagctgccgtgcgtctcagagtgtgtcgagttatctggcgtggtaccaacaaaaaccgggccaggcgccgcgactgctgatttatgatgcttctaatcgtgcgactggtattccggcgcgctttagcggttctggctcaggcactgacttcactctgactatttcttcgctggaaccggaagattttgcggtgtactattgtcaacaatcatctaattggcctcgtacgttcggtcaaggtacaaaagtggagataaaattcaaagcggaggctgacaaggccgctgcagcaaaagctgactcctttatgaacgcgggttacaaaaacttcatgaccgaggtaaataatctcaataaacgtatgggtgatctgcgcgacactaatggggatgcaggcgcatgggcacgcattatgtctggtgcaggttcggcggatggcgggtattctgacaattacactcatgttcaggtgggcttcgataaaaaacatgagctggacggtgtggatctgttcactggcgtaaccatgacttatactgattcaagcgcagacagccacgcattttcaggtaaaacgaaatcagttggcggcggtctgtatgcgagcgcactgttcgagagcggcgcctacattgatctaattggcaagtatattcaccatgataatgattacacagggaactttgcaggcctgggcaccaaacactataacacgcattcatggtacgctggcgcagaaaccggctatagataccacctgaccgaggaaacctttatcgaaccgcaagcggaactggtttacggtgcggtcagtggcaagacctttcgttggaaagatggtgatatggatctgtcaatgaaaaaccgcgacttcagccccttgatcggccgcaccggcattgagctgggcaaaaccttctctggcaaagattggtctgttaccgcgcgtgcgggcacttcgtggcaatttgatctgctaaacaacggtgagactgtactgcgtgatgcgagtggcgaaaaacgtattaaaggtgaaaaagatagtagaatgctattcaacgtgggcatgaatgcgcagatcaaagataacatgcgttttgggttggagtttgaaaaatccgcgttcggtaaatataatgttgacaatgctgtgaacgcgaatttccgctacatgttttaa

SEQ ID NO: 832 - DNA, 1803 bp, Artificial Sequence
  source: /note="Description of Artificial Sequence: Synthetic polynucleotide"
  source: /note="Anti-PD-1 single chain antibody coding region (Light Chain linker Heavy Chain) with N terminal and C terminal Secretion Tag for Type V auto-secreter"
atgaacaaagtatatagcctgaaatattgcccagtaactgggggtctgattgtagtcagtgaactggcatcccgcgtcatcaaaaaaacctgccgtcgtctgactcacatcctgctggcgggtattccggctgtgtatctgtactacccgcagatctcccaggcaggtatcgtccgcgaaatcgtgctgactcagagtccggcgactctgtctctgagtccgggcgaacgcgcgactctgtcttgccgtgcgtctcaatctgtgtcttcatacttggcttggtaccaacaaaaaccgggccaggcgccgcgactgttgatttatgatgcgtcgaatcgcgcgactggcattccggcgcgcttttcgggtagcggttctggtactgattttacgctgactatctcttctctggagcctgaagatttcgctgtttattactgccaacagtctagtaattggccgcgtactttcggccagggcactaaggtggaaattaaaggtggcggctcgggcggcggctcgggtggtggttctggtggtggccaagtgcaactggtggaaagtggcggcggggtggtgcaaccgggccgttctctgcgcctggattgtaaagcttcaggcattacttttagcaactctggtatgcactgggttcgccaagctccgggcaaaggcctggaatgggtggcggttatttggtacgatggctctaaacgttattacgctgacagtgttaaaggccgctttaccatttctcgtgataattctaaaaataccctgtttctgcaaatgaactcgctgcgcgcggaagatactgctgtttactattgtgcgactaatgatgattactggggtcaaggtaccctggttaccgtgtcttctttcaaagcggaggctgacaaggccgctgcagcaaaagctgactcctttatgaacgcgggttacaaaaacttcatgaccgaggtaaataatctcaataaacgtatgggtgatctgcgcgacactaatggggatgcaggcgcatgggcacgcattatgtctggtgcaggttcggcggatggcgggtattctgacaattacactcatgttcaggtgggcttcgataaaaaacatgagctggacggtgtggatctgttcactggcgtaaccatgacttatactgattcaagcgcagacagccacgcattttcaggtaaaacgaaatcagttggcggcggtctgtatgcgagcgcactgttcgagagcggcgcctacattgatctaattggcaagtatattcaccatgataatgattacacagggaactttgcaggcctgggcaccaaacactataacacgcattcatggtacgctggcgcagaaaccggctatagataccacctgaccgaggaaacctttatcgaaccgcaagcggaactggtttacggtgcggtcagtggcaagacctttcgttggaaagatggtgatatggatctgtcaatgaaaaaccgcgacttcagccccttgatcggccgcaccggcattgagctgggcaaaaccttctctggcaaagattggtctgttaccgcgcgtgcgggcacttcgtggcaatttgatctgctaaacaacggtgagactgtactgcgtgatgcgagtggcgaaaaacgtattaaaggtgaaaaagatagtagaatgctattcaacgtgggcatgaatgcgcagatcaaagataacatgcgttttgggttggagtttgaaaaatccgcgttcggtaaatataatgttgacaatgctgtgaacgcgaatttccgctacatgttttaa

SEQ ID NO: 833 - DNA, 1821 bp, Artificial Sequence
  source: /note="Description of Artificial Sequence: Synthetic polynucleotide"
  source: /note="Anti-PD-L1 single chain antibody coding region (Light Chain linker Heavy Chain) with N terminal and C terminal Secretion Tag for Type V auto-secreter"
atgaacaaagtatatagcctgaaatattgcccagtaactgggggtctgattgtagtcagtgaactggcatcccgcgtcatcaaaaaaacctgccgtcgtctgactcacatcctgctggcgggtattccggctgtgtatctgtactacccgcagatctcccaggcaggtatcgtccgcgatattcaaatgactcaatctccgagctctctgagtgcgtctgtgggtgatcgtgtgactattacttgtcgtgcgtctcaagatgtttcaactgcggttgcgtggtatcaacagaaaccgggcaaggcgcctaagctgctgatttattctgcttcgttcctgtacagcggtgtgccgtctcgtttctctggctctggttcgggtactgatttcactctgactatttcgagtctgcagccggaagattttgcgacttattattgtcaacaatatctgtatcaccctgcgacgtttggtcaaggcacgaaagttgaaattaaacgtggtggtggctctggtggtggcagcggtggtgggtcgggtggcggtgaagttcaactggttgagtcaggtggtggcctggtgcaaccgggcggctctctgcgcctgtcttgtgctgcgtcgggttttacgttctctgatagctggattcactgggtacgccaggcaccgggcaaaggtctggaatgggtagcttggatttcaccttatggtggctctacttattacgcggatagcgtgaaaggtcgctttactatttctgcggacactagcaaaaatactgcttacctgcaaatgaattcgctgcgtgctgaggatactgcagtgtattactgtgcgcgtcgtcattggcctggcggctttgattattggggtcaaggtactctggttactgttagcagcttcaaagcggaggctgacaaggccgctgcagcaaaagctgactcctttatgaacgcgggttacaaaaacttcatgaccgaggtaaataatctcaataaacgtatgggtgatctgcgcgacactaatggggatgcaggcgcatgggcacgcattatgtctggtgcaggttcggcggatggcgggtattctgacaattacactcatgttcaggtgggcttcgataaaaaacatgagctggacggtgtggatctgttcactggcgtaaccatgacttatactgattcaagcgcagacagccacgcattttcaggtaaaacgaaatcagttggcggcggtctgtatgcgagcgcactgttcgagagcggcgcctacattgatctaattggcaagtatattcaccatgataatgattacacagggaactttgcaggcctgggcaccaaacactataacacgcattcatggtacgctggcgcagaaaccggctatagataccacctgaccgaggaaacctttatcgaaccgcaagcggaactggtttacggtgcggtcagtggcaagacctttcgttggaaagatggtgatatggatctgtcaatgaaaaaccgcgacttcagccccttgatcggccgcaccggcattgagctgggcaaaaccttctctggcaaagattggtctgttaccgcgcgtgcgggcacttcgtggcaatttgatctgctaaacaacggtgagactgtactgcgtgatgcgagtggcgaaaaacgtattaaaggtgaaaaagatagtagaatgctattcaacgtgggcatgaatgcgcagatcaaagataacatgcgttttgggttggagtttgaaaaatccgcgttcggtaaatataatgttgacaatgctgtgaacgcgaatttccgctacatgttttaa

SEQ ID NO: 834 - DNA, 1821 bp, Artificial Sequence
  source: /note="Description of Artificial Sequence: Synthetic polynucleotide"
  source: /note="Anti-PD-L1 single chain antibody coding region (Heavy Chain linker Light Chain) with N terminal and C terminal Secretion Tag for Type V auto-secreter"
atgaacaaagtatatagcctgaaatattgcccagtaactgggggtctgattgtagtcagtgaactggcatcccgcgtcatcaaaaaaacctgccgtcgtctgactcacatcctgctggcgggtattccggctgtgtatctgtactacccgcagatctcccaggcaggtatcgtccgcgaagtgcagctggtggagtcaggtggaggcttggtgcaaccgggcggttcactgcgtctgtcatgtgcggcgtctgggtttacttttagtgactcttggattcactgggtgcgccaggctccgggtaaaggcctggaatgggtagcttggattagtccttacggtggctcgacctattatgctgattcggtaaagggtcgctttactattagcgctgatacttctaaaaatactgcatacctgcagatgaatagcctgcgcgctgaggatactgctgtgtattattgcgcgcgtcgccactggccgggcggctttgattattggggccaaggtactctggttaccgtgtctagtggcggtggtagcggcggcggctcaggtggcggctcgggcggtggcgacattcagatgactcagtctccgtcttctttgtcggcgagcgtgggcgatcgtgttaccatcacgtgtcgcgcgagccaagatgtgtcgactgcggtggcttggtatcaacaaaaaccgggtaaagctccgaaactgctgatttatagtgcgtcttttttgtattctggtgttccgtctcgtttctctggctcaggtagcggtactgattttacgctgactatttcttcactgcaaccggaagattttgctacgtattattgtcaacaatatctgtatcacccggcgacgtttggtcagggtactaaggtggagataaaacgcttcaaagcggaggctgacaaggccgctgcagcaaaagctgactcctttatgaacgcgggttacaaaaacttcatgaccgaggtaaataatctcaataaacgtatgggtgatctgcgcgacactaatggggatgcaggcgcatgggcacgcattatgtctggtgcaggttcggcggatggcgggtattctgacaattacactcatgttcaggtgggcttcgataaaaaacatgagctggacggtgtggatctgttcactggcgtaaccatgacttatactgattcaagcgcagacagccacgcattttcaggtaaaacgaaatcagttggcggcggtctgtatgcgagcgcactgttcgagagcggcgcctacattgatctaattggcaagtatattcaccatgataatgattacacagggaactttgcaggcctgggcaccaaacactataacacgcattcatggtacgctggcgcagaaaccggctatagataccacctgaccgaggaaacctttatcgaaccgcaagcggaactggtttacggtgcggtcagtggcaagacctttcgttggaaagatggtgatatggatctgtcaatgaaaaaccgcgacttcagccccttgatcggccgcaccggcattgagctgggcaaaaccttctctggcaaagattggtctgttaccgcgcgtgcgggcacttcgtggcaatttgatctgctaaacaacggtgagactgtactgcgtgatgcgagtggcgaaaaacgtattaaaggtgaaaaagatagtagaatgctattcaacgtgggcatgaatgcgcagatcaaagataacatgcgttttgggttggagtttgaaaaatccgcgttcggtaaatataatgttgacaatgctgtgaacgcgaatttccgctacatgttttaa

SEQ ID NO: 835 - DNA, 885 bp, Artificial Sequence
  source: /note="Description of Artificial Sequence: Synthetic polynucleotide"
  source: /note="Anti-CTLA-4 single chain antibody coding region (Heavy Chain linker Light Chain) for type I hemolysin secretion, including HlyA tag"
atgcaggtacaattagttgagagcggcggcggtgtggttcaaccgggccgtagtctgcgattgtcttgtgctgcatctggttttactttcagttcttacacgatgcactgggttcgccaagctccgggcaaaggcctggagtgggttacctttatttcttacgatggcaataataagtattacgctgattctgtgaaaggtcgctttactattagccgagataactctaaaaatactctgtatctgcaaatgaattctctgcgtgcggaagatactgcgatctattattgtgcgcgtactggttggctgggcccgtttgattattggggccaaggcacgctggttactgttagttcgggcggcggttctggtggcggctctggtggtggctctggcggcggcgagattgtgctgactcaatctccgggcacgctgtcactgtctccgggtgaacgcgcgaccctgtcttgtcgcgcgagtcaaagtgttggttcttcttatctggcttggtatcagcaaaagcctggtcaagcgccgcgtctgttgatttatggcgcgttttcgcgcgcgactggcattccggaccgattttctggttctggttctggcactgatttcactctgaccatttcacgcctggaaccggaggattttgcggtgtactattgccaacaatatggctcatcgccgtggacgtttggccaaggtactaaagttgagattaaacttaatccattaattaatgaaatcagcaaaatcatttcagctgcaggtaattttgatgttaaagaggaaagagctgcagcttctttattgcagttgtccggtaatgccagtgatttttcatatggacggaactcaataactttgacagcatcagcataa

SEQ ID NO: 836 - DNA, 885 bp, Artificial Sequence
  source: /note="Description of Artificial Sequence: Synthetic polynucleotide"
  source: /note="Anti-CTLA-4 single chain antibody coding region (Light Chain linker Heavy Chain) for type I hemolysin secretion, including HlyA tag"
atggaaattgtactgacccagtcgcctggtaccctgtctctgtcgccgggtgaacgtgctaccctgtcttgtcgtgcttcgcaatcggttggctcgtcttatctggcatggtatcagcaaaaaccgggccaagcgcctcgtctgctgatttatggcgcgttttctcgtgctacgggcattcctgatcgtttttcgggctctggctctggtactgattttacgctgactatcagccgcttggaacctgaagattttgcggtttattattgccaacaatatggctcttctccgtggacgtttggtcaaggcactaaagttgaaattaaaggtggtggctcgggcggtggttctggtggtggtagtggtggtggtcaagtgcagttggttgaatcgggtggcggtgttgtgcagccgggccgttcgttgcgtctgtcttgcgcagcgagtggtttcaccttctcttcttatactatgcactgggtgcgtcaagcacctggcaaaggtctggagtgggtaacttttatttcatacgatggtaataataaatattatgcagattctgttaaaggtcgctttacgatttctcgcgataattcaaaaaatacgctgtatctgcagatgaattcgctgcgcgctgaggatactgcgatctactattgtgcgcgtactggttggctgggtccgtttgattactggggccaaggtacgctggttacagtttcgtcgcttaatccattaattaatgaaatcagcaaaatcatttcagctgcaggtaattttgatgttaaagaggaaagagctgcagcttctttattgcagttgtccggtaatgccagtgatttttcatatggacggaactcaataactttgacagcatcagcataa

SEQ ID NO: 837 - DNA, 867 bp, Artificial Sequence
  source: /note="Description of Artificial Sequence: Synthetic polynucleotide"
  source: /note="Anti-PD-1 single chain antibody coding region (Heavy Chain linker Light Chain) for type I hemolysin secretion, including HlyA tag"
atgcaagtacaactggttgaatccggcggaggagtggtgcaaccgggccgcagtttgcgtctggattgtaaagcttcaggcatcactttttctaattctggtatgcactgggttcgccaagctccgggtaaaggtctggagtgggttgcggtgatctggtatgatggttctaaacgatattatgcggatagtgttaagggtcgttttactatttctcgtgataattctaagaacaccttgtttctgcagatgaatagtctgcgcgctgaggatactgcggtatattattgtgcgactaatgacgattattggggccaaggcacgctggttaccgtgagctctggtggtggttcgggtggtggttctggtggtgggagcggcggtggcgagatcgttctgactcaaagcccggcgactctgagtctgagtccgggtgaacgtgcgactctgagctgccgtgcgtctcagagtgtgtcgagttatctggcgtggtaccaacaaaaaccgggccaggcgccgcgactgctgatttatgatgcttctaatcgtgcgactggtattccggcgcgctttagcggttctggctcaggcactgacttcactctgactatttcttcgctggaaccggaagattttgcggtgtactattgtcaacaatcatctaattggcctcgtacgttcggtcaaggtacaaaagtggagataaaacttaatccattaattaatgaaatcagcaaaatcatttcagctgcaggtaattttgatgttaaagaggaaagagctgcagcttctttattgcagttgtccggtaatgccagtgatttttcatatggacggaactcaataactttgacagcatcagcataa

SEQ ID NO: 838 - DNA, 867 bp, Artificial Sequence
  source: /note="Description of Artificial Sequence: Synthetic polynucleotide"
  source: /note="Anti-PD-1 single chain antibody coding region (Light Chain linker Heavy Chain) for type I hemolysin secretion, including HlyA tag"
atggaaatcgtgctgactcagagtccggcgactctgtctctgagtccgggcgaacgcgcgactctgtcttgccgtgcgtctcaatctgtgtcttcatacttggcttggtaccaacaaaaaccgggccaggcgccgcgactgttgatttatgatgcgtcgaatcgcgcgactggcattccggcgcgcttttcgggtagcggttctggtactgattttacgctgactatctcttctctggagcctgaagatttcgctgtttattactgccaacagtctagtaattggccgcgtactttcggccagggcactaaggtggaaattaaaggtggcggctcgggcggcggctcgggtggtggttctggtggtggccaagtgcaactggtggaaagtggcggcggggtggtgcaaccgggccgttctctgcgcctggattgtaaagcttcaggcattacttttagcaactctggtatgcactgggttcgccaagctccgggcaaaggcctggaatgggtggcggttatttggtacgatggctctaaacgttattacgctgacagtgttaaaggccgctttaccatttctcgtgataattctaaaaataccctgtttctgcaaatgaactcgctgcgcgcggaagatactgctgtttactattgtgcgactaatgatgattactggggtcaaggtaccctggttaccgtgtcttctcttaatccattaattaatgaaatcagcaaaatcatttcagctgcaggtaattttgatgttaaagaggaaagagctgcagcttctttattgcagttgtccggtaatgccagtgatttttcatatggacggaactcaataactttgacagcatcagcataa

SEQ ID NO: 839 - DNA, 885 bp, Artificial Sequence
  source: /note="Description of Artificial Sequence: Synthetic polynucleotide"
  source: /note="Anti-PD-L1 single chain antibody coding region (Light Chain linker Heavy Chain) for type I hemolysin secretion, including HlyA tag"
atggatattcaaatgactcaatctccgagctctctgagtgcgtctgtgggtgatcgtgtgactattacttgtcgtgcgtctcaagatgtttcaactgcggttgcgtggtatcaacagaaaccgggcaaggcgcctaagctgctgatttattctgcttcgttcctgtacagcggtgtgccgtctcgtttctctggctctggttcgggtactgatttcactctgactatttcgagtctgcagccggaagattttgcgacttattattgtcaacaatatctgtatcaccctgcgacgtttggtcaaggcacgaaagttgaaattaaacgtggtggtggctctggtggtggcagcggtggtgggtcgggtggcggtgaagttcaactggttgagtcaggtggtggcctggtgcaaccgggcggctctctgcgcctgtcttgtgctgcgtcgggttttacgttctctgatagctggattcactgggtacgccaggcaccgggcaaaggtctggaatgggtagcttggatttcaccttatggtggctctacttattacgcggatagcgtgaaaggtcgctttactatttctgcggacactagcaaaaatactgcttacctgcaaatgaattcgctgcgtgctgaggatactgcagtgtattactgtgcgcgtcgtcattggcctggcggctttgattattggggtcaaggtactctggttactgttagcagccttaatccattaattaatgaaatcagcaaaatcatttcagctgcaggtaattttgatgttaaagaggaaagagctgcagcttctttattgcagttgtccggtaatgccagtgatttttcatatggacggaactcaataactttgacagcatcagcataa

SEQ ID NO: 840 - DNA, 885 bp, Artificial Sequence
  source: /note="Description of Artificial Sequence: Synthetic polynucleotide"
  source: /note="Anti-PD-L1 single chain antibody coding region (Heavy Chain linker Light Chain) for type I hemolysin secretion, including HlyA tag"
atggaagtgcagctggtggagtcaggtggaggcttggtgcaaccgggcggttcactgcgtctgtcatgtgcggcgtctgggtttacttttagtgactcttggattcactgggtgcgccaggctccgggtaaaggcctggaatgggtagcttggattagtccttacggtggctcgacctattatgctgattcggtaaagggtcgctttactattagcgctgatacttctaaaaatactgcatacctgcagatgaatagcctgcgcgctgaggatactgctgtgtattattgcgcgcgtcgccactggccgggcggctttgattattggggccaaggtactctggttaccgtgtctagtggcggtggtagcggcggcggctcaggtggcggctcgggcggtggcgacattcagatgactcagtctccgtcttctttgtcggcgagcgtgggcgatcgtgttaccatcacgtgtcgcgcgagccaagatgtgtcgactgcggtggcttggtatcaacaaaaaccgggtaaagctccgaaactgctgatttatagtgcgtcttttttgtattctggtgttccgtctcgtttctctggctcaggtagcggtactgattttacgctgactatttcttcactgcaaccggaagattttgctacgtattattgtcaacaatatctgtatcacccggcgacgtttggtcagggtactaaggtggagataaaacgccttaatccattaattaatgaaatcagcaaaatcatttcagctgcaggtaattttgatgttaaagaggaaagagctgcagcttctttattgcagttgtccggtaatgccagtgatttttcatatggacggaactcaataactttgacagcatcagcataa

SEQ ID NO: 841 - DNA, 159 bp, Artificial Sequence; identical to SEQ ID NO: 754
  source: /note="Description of Artificial Sequence: Synthetic polynucleotide"
  source: /note="C terminal HlyA secretion Tag"

SEQ ID NO: 842 - DNA, 2124 bp, Artificial Sequence
  source: /note="Description of Artificial Sequence: Synthetic polynucleotide"
  source: /note="HlyB coding sequence"
atggattcttgtcataaaattgattatgggttatacgccctggagattttagcccaataccataacgtctctgttaacccggaagaaattaaacatagatttgacacagacgggactggtctgggattaacgtcatggttgcttgctgcgaaatctttagaactaaaggtaaaacaggtaaaaaaaacaattgaccgattaaactttatttctttgcccgcattagtctggagagaggatggacgtcattttattctgactaaagtcagtaaagaagcaaacagatatcttatttttgatctggagcaacgaaatccccgtgttctcgaacagtctgagtttgaggcgttatatcaggggcatattattcttattgcttcccgttcttctgttaccgggaaactggcaaaatttgactttacctggtttatccctgccattataaaatacagaaaaatatttattgaaacccttgttgtatctgtttttttacaattatttgcattaataaccccccttttttttcaggtggttatggacaaagtattagtacacagggggttttcaacccttaatgttattactgtcgcattatctgttgtggtggtgtttgagattatactcagcggtttaagaacttacatttttgcacatagtacaagtcggattgatgttgagttgggtgccaaactcttccggcatttactggcgctaccgatctcttattttgagagtcgtcgtgttggtgatactgttgccagggtaagagaattagaccagatccgtaattttctgacaggacaggcattaacatctgttctggacttattattttcattcatattttttgcggtaatgtggtattacagcccaaagcttactctggtgatcttattttcgctgccctgttatgctgcatggtctgtttttattagccccattttgcgacgtcgccttgatgataagttttcacggaatgcggataatcaatctttcctggtggaatcagtcacggcgattaacactataaaagctatggcagtctcacctcagatgacgaacatatgggacaaacaattggcaggatatgttgctgcaggctttaaagtgacagtattagccaccattggtcaacaaggaatacagttaatacaaaagactgttatgatcatcaacctgtggttgggagcacacctggttatttccggggatttaagtattggtcagttaattgcttttaatatgcttgctggtcagattgttgcaccggttattcgccttgcacaaatctggcaggatttccagcaggttggtatatcagttacccgccttggtgatgtgcttaactctccaactgaaagttatcatgggaaactggcattaccggaaattaatggtaatatcacttttcgtaatatccggtttcgctataagcctgactctccggttattttagataatatcaatctcagtattaagcagggggaggttattggtattgtcggacgttctggttcaggaaaaagcacattaactaaattaattcaacgtttttatattcctgaaaatggccaggtcttaattgatggacatgatcttgcgttggccgatcctaactggttacgtcgtcaggtgggggttgtgttgcaggacaatgtgctgcttaatcgcagtattattgataatatctcactggctaatcctggtatgtccgtcgaaaaagttatttatgcagcgaaattagcaggcgctcatgattttatttctgaattgcgtgaggggtataacaccattgtcggggaacagggggcaggattatccggaggtcaacgtcaacgcatcgcaattgcaagggcgctggtgaacaaccctaaaatacttatttttgatgaagcaaccagtgctctggattatgagtcggagcatatcatcatgcgcaatatgcacaaaatatgtaagggcagaacggttataatcattgctcatcgtctgtctacagtaaaaaatgcagaccgcattattgtcatggaaaaagggaaaattgttgaacagggtaaacataaggaactgctttctgaaccggaaagtttatacagttacttatatcagttacagtcagactaa

SEQ ID NO: 843 - DNA, 1437 bp, Artificial Sequence
  source: /note="Description of Artificial Sequence: Synthetic polynucleotide"
  source: /note="HlyD coding sequence"
atgaaaacatggttaatggggttcagcgagttcctgttgcgctataaacttgtctggagtgaaacatggaaaatccggaagcaattagatactccggtacgtgaaaaggacgaaaatgaattcttacccgctcatctggaattaattgaaacgccggtatccagacggccgcgtctggttgcttattttattatggggtttctggttattgctgtcattttatctgttttaggtcaggtggaaattgttgccactgcaaatgggaaattaacactaagtgggcgcagcaaagaaattaaacctattgaaaactcaatagttaaagaaattatcgtaaaagaaggagagtcagtccggaaaggggatgtgttattaaagcttacagcactgggagctgaagctgatacgttaaaaacacagtcatcactgttacagaccaggctggaacaaactcggtatcaaattctgagcaggtcaattgaattaaataaactacctgaactgaagcttcctgatgagccttattttcagaatgtatctgaagaggaagtactgcgtttaacttctttgataaaagaacagttttccacatggcaaaatcagaagtatcaaaaagaactgaatctggataagaaaagagcagagcgattaacaatacttgcccgtataaaccgttatgaaaatttatcgagagttgaaaaaagccgtctggatgatttcaggagtttattgcataaacaggcaattgcaaaacatgctgtacttgagcaggagaataaatatgtcgaggcagcaaatgaattacgggtttataaatcgcaactggagcaaattgagagtgagatattgtctgcaaaagaagaatatcagcttgtcacgcagctttttaaaaatgaaattttagacaagctaagacaaacaacagacaacattgagttattaactctggagttagagaaaaatgaagagcgtcaacaggcttcagtaatcagggcccctgtttcgggaaaagttcagcaactgaaggttcatactgaaggtggggttgttacaacagcggaaacactgatggtcatcgttccggaagatgacacgctggaggttactgctctggtacaaaataaagatattggttttattaacgtcgggcagaatgccatcattaaagtggaggcctttccttacacccgatatggttatctggtgggtaaggtgaaaaatataaatttagatgcaatagaagaccagaaactgggactcgtttttaatgtcattgtttctgttgaagagaatgatttgtcaaccgggaataagcacattccattaagctcgggtatggctgtcactgcagaaataaagactggaatgcgaagcgtaatcagctatcttcttagtcctctggaagagtctgtaacagaaagtttacatgagcgttaa

SEQ ID NO: 844 - protein, 119 aa, Artificial Sequence
  source: /note="Description of Artificial Sequence: Synthetic polypeptide"
  source: /note="Anti-CTLA-4 Heavy"
MQVQLVESGGGVVQPGRSLRLSCAASGFTFSSYTMHWVRQAPGKGLEWVTFISYDGNNKYYADSVKGRFTISRDNSKNTLYLQMNSLRAEDTAIYYCARTGWLGPFDYWGQGTLVTVSS

SEQ ID NO: 845 - protein, 108 aa, Artificial Sequence; identical to SEQ ID NO: 8
  source: /note="Description of Artificial Sequence: Synthetic polypeptide"
  source: /note="Anti-CTLA-4 Light"

SEQ ID NO: 846 - protein, 114 aa, Artificial Sequence
  source: /note="Description of Artificial Sequence: Synthetic polypeptide"
  source: /note="Anti-PD-1 Heavy"
MQVQLVESGGGVVQPGRSLRLDCKASGITFSNSGMHWVRQAPGKGLEWVAVIWYDGSKRYYADSVKGRFTISRDNSKNTLFLQMNSLRAEDTAVYYCATNDDYWGQGTLVTVSS

SEQ ID NO: 847 - protein, 107 aa, Artificial Sequence [sequence omitted]

SEQ ID NO: 848 - protein, 109 aa, Artificial Sequence
  source: /note="Description of Artificial Sequence: Synthetic polypeptide"
  source: /note="Anti-PD-L1 Light"
MDIQMTQSPSSLSASVGDRVTITCRASQDVSTAVAWYQQKPGKAPKLLIYSASFLYSGVPSRFSGSGSGTDFTLTISSLQPEDFATYYCQQYLYHPATFGQGTKVEIKR

SEQ ID NO: 849 - protein, 118 aa, Artificial Sequence [sequence omitted]

SEQ ID NO: 850 - protein, 15 aa, Artificial Sequence
  source: /note="Description of Artificial Sequence: Synthetic peptide"
  source: /note="Linker"
GGGSGGGSGGGSGGG

SEQ ID NO: 851 - protein, 59 aa, Artificial Sequence
  source: /note="Description of Artificial Sequence: Synthetic polypeptide"
  source: /note="N Terminal Secretion Tag For Type V Auto-secreter Secretion"
MNKVYSLKYCPVTGGLIVVSELASRVIKKTCRRLTHILLAGIPAVYLYYPQISQAGIVR

SEQ ID NO: 852 - protein, 162 aa, Artificial Sequence
  source: /note="Description of Artificial Sequence: Synthetic polypeptide"
  source: /note="C Terminal Secretion Tag For Type V Auto-secreter Secretion"
FKAEADKAAAAKADSFMNAGYKNFMTEVNNLNKRMGDLRDTNGDAGAWARIMSGAGSADGGYSDNYTHVQVGFDKKHELDGVDLFTGVTMTYTDSSADSHAFSGKTKSVGGGLYASALFESGAYIDLIGKYIHHDNDYTGNFAGLGTKHYNTHSWYAGAETG

SEQ ID NO: 853 - protein, 52 aa, Artificial Sequence; identical to SEQ ID NO: 753
  source: /note="Description of Artificial Sequence: Synthetic polypeptide"
  source: /note="C-Terminal HlyA Secretion Tag"

SEQ ID NO: 854 - protein, 707 aa, Artificial Sequence
  source: /note="Description of Artificial Sequence: Synthetic polypeptide"
  source: /note="HlyB"
MDSCHKIDYGLYALEILAQYHNVSVNPEEIKHRFDTDGTGLGLTSWLLAAKSLELKVKQVKKTIDRLNFISLPALVWREDGRHFILTKVSKEANRYLIFDLEQRNPRVLEQSEFEALYQGHIILIASRSSVTGKLAKFDFTWFIPAIIKYRKIFIETLVVSVFLQLFALITPLFFQVVMDKVLVHRGFSTLNVITVALSVVVVFEIILSGLRTYIFAHSTSRIDVELGAKLFRHLLALPISYFESRRVGDTVARVRELDQIRNFLTGQALTSVLDLLFSFIFFAVMWYYSPKLTLVILFSLPCYAAWSVFISPILRRRLDDKFSRNADNQSFLVESVTAINTIKAMAVSPQMTNIWDKQLAGYVAAGFKVTVLATIGQQGIQLIQKTVMIINLWLGAHLVISGDLSIGQLIAFNMLAGQIVAPVIRLAQIWQDFQQVGISVTRLGDVLNSPTESYHGKLALPEINGNITFRNIRFRYKPDSPVILDNINLSIKQGEVIGIVGRSGSGKSTLTKLIQRFYIPENGQVLIDGHDLALADPNWLRRQVGVVLQDNVLLNRSIIDNISLANPGMSVEKVIYAAKLAGAHDFISELREGYNTIVGEQGAGLSGGQRQRIAIARALVNNPKILIFDEATSALDYESEHIIMRNMHKICKGRTVIIIAHRLSTVKNADRIIVMEKGKIVEQGKHKELLSEPESLYSYLYQLQSD

SEQ ID NO: 855 - protein, 478 aa, Artificial Sequence
  source: /note="Description of Artificial Sequence: Synthetic polypeptide"
  source: /note="HlyD"
MKTWLMGFSEFLLRYKLVWSETWKIRKQLDTPVREKDENEFLPAHLELIETPVSRRPRLVAYFIMGFLVIAVILSVLGQVEIVATANGKLTLSGRSKEIKPIENSIVKEIIVKEGESVRKGDVLLKLTALGAEADTLKTQSSLLQTRLEQTRYQILSRSIELNKLPELKLPDEPYFQNVSEEEVLRLTSLIKEQFSTWQNQKYQKELNLDKKRAERLTILARINRYENLSRVEKSRLDDFRSLLHKQAIAKHAVLEQENKYVEAANELRVYKSQLEQIESEILSAKEEYQLVTQLFKNEILDKLRQTTDNIELLTLELEKNEERQQASVIRAPVSGKVQQLKVHTEGGVVTTAETLMVIVPEDDTLEVTALVQNKDIGFINVGQNAIIKVEAFPYTRYGYLVGKVKNINLDAIEDQKLGLVFNVIVSVEENDLSTGNKHIPLSSGMAVTAEIKTGMRSVISYLLSPLEESVTESLHER

SEQ ID NO: 856 - DNA, 213 bp, Artificial Sequence
  source: /note="Description of Artificial Sequence: Synthetic polynucleotide"
  source: /note="PfnrS"
ggtaccagttgttcttattggtggtgttgctttatggttgcatcgtagtaaatggttgtaacaaaagcaatttttccggctgtctgtatacaaaaacgccgtaaagtttgagcgaagtcaataaactctctacccattcagggcaatatctctcttggatccaaagtgaactctagaaataattttgtttaactttaagaaggagatatacat

SEQ ID NO: 857 - DNA, 1455 bp, Artificial Sequence
  source: /note="Description of Artificial Sequence: Synthetic polynucleotide"
  source: /note="PfnrS-nupC"
ggtaccagttgttcttattggtggtgttgctttatggttgcatcgtagtaaatggttgtaacaaaagcaatttttccggctgtctgtatacaaaaacgccgtaaagtttgagcgaagtcaataaactctctacccattcagggcaatatctctcttggatccaaagtgaactctagaaataattttgtttaactttaagaaggagatatacatgtgcacggaaatttaacctgcctcatatttggagcaaatatggaccgcgtccttcattttgtactggcacttgccgttgttgcgattctcgcactgctggtaagcagcgaccgcaaaaaaattcgtatccgttatgttattcaactgcttgttatcgaagtgttactggcgtggttcttcctgaactccgacgttggtctgggcttcgtgaaaggcttctccgaaatgttcgaaaaactgctcggttttgccaacgaagggactaacttcgtctttggtagcatgaatgatcaaggcctggcattcttcttcctgaaagtgctgtgcccaatcgtctttatctctgcgctgatcggtattctccagcatattcgcgtattgccggtgattatccgcgcaattggtttcctgctctccaaagtcaacggcatgggcaaactggaatcctttaacgccgtcagctccctgattctgggtcagtctgaaaactttattgcctataaagatatcctcggcaaaatctcccgcaatcgtatgtacaccatggcagcaacggcgatgtccaccgtgtcgatgtccatcgttggtgcatatatgaccatgctggagccgaaatacgtcgttgcggcgctggtactgaacatgttcagcacctttatcgtgctgtcgctgatcaacccttaccgtgttgatgccagtgaagaaaacattcagatgtccaacctgcacgaaggtcagagcttcttcgaaatgctgggtgaatacattctggcaggtttcaaagttgccattatcgttgccgcgatgctgatcggctttatcgccctgatcgctgcactgaacgctctgtttgctaccgtgactggctggtttggctacagcatctccttccagggcatcctgggttacatcttctatccgattgcatgggtgatgggtgttccttccagtgaagcactgcaagtgggcagtatcatggcgaccaaactggtttccaacgagttcgttgcgatgatggatctgcagaaaattgcttccacgctctctccgcgtgcggaaggcatcatctctgtgttcctggtttccttcgctaacttctcttcaatcgggattatcgcgggtgcggttaaaggcctgaatgaagagcaaggtaacgtggtttctcgcttcggtctgaaactggtttacggctctaccctggtgagtgtgctgtctgcgtcaatcgcagcactggtgctgtaa

SEQ ID NO: 858 - DNA, 3837 bp, Artificial Sequence
  source: /note="Description of Artificial Sequence: Synthetic polynucleotide"
  source: /note="PfnrS-xdhABC"
ggtaccagttgttcttattggtggtgttgctttatggttgcatcgtagtaaatggttgtaacaaaagcaatttttccggctgtctgtatacaaaaacgccgtaaagtttgagcgaagtcaataaactctctacccattcagggcaatatctctcttggatccaaagtgaactctagaaataattttgtttaactttaagaaggagatatacatatgcgcgtcgatgccattgctaaggtcaccgggcgggcacgatatactgacgattatattatggcgggcatgtgttacgcgaaatatgtacgtagccctatcgcacatggttatgctgtaaatattaatgatgaacaagccaggagtttgccgggcgtcctggcgatttttacctgggaagatgtgccagaaatcccattcgccacggcagggcatgcctggacacttgacgaaaacaagcgcgataccgccgatcgtgccctgctaacgcgtcatgttcgtcatcatggtgacgccgttgccatcgtcgtggcccgcgatgaactcacggcagaaaaagcggcgcaattggtcagcattgagtggcaagaattacccgttatcacctcgccagaagcggcgctggcagaagacgctgcaccaatccataacggtggcaatttactgaaacaaagcacgatgtcgacgggtaatgtccaacaaacaatcgatgccgccgactaccaggtacaggggcactatcagactcccgttattcaacattgtcatatggaaagcgtgacatcgctggcatggatggaggatgactcgcgaattaccatcgtttccagcacccagatcccgcacattgttcgccgcgtggttggtcaggcgctggatattccctggtcatgcgtacgagtcatcaaaccgtttatcggtggcggttttggtaataaacaggatgtactggaagagccaatggcggcattcctgaccagcaaacttggcggcattccggtgaaagtttcccttagccgtgaagagtgtttcctcgcaacccgtacccgccacgcttttactattgacgggcaaatgggcgtgaaccgcgacggaacattgaaaggttatagtctggatgttctgtctaacaccggcgcttatgcatctcacgggcactccattgcttctgctggggggaataaagtcgcttacctttatcctcgttgtgcctacgcttacagttcaaagacctgctataccaacctcccctcggctggtgcgatgcgtggttatggcgcgccacaagtcgtatttgccgttgagtctatgcttgatgatgccgcgacagcgttaggtattgatcctgttgaaattcgtttacgcaacgccgcccgcgaaggagatgctaatccgctcacgggaaaacgtatttacagcgcagggttgccggagtgtcttgaaaaaggccggaaaatctttgaatgggaaaaacgccgtgcagagtgccagaaccagcaaggcaatttacgtcgtggcgttggcgtcgcctgttttagctacacctctaacacctggcctgtcggcgtagaaatagcaggcgcgcgcctgttgatgaatcaggatggaaccatcaacgtgcaaagcggcgcgacggaaatcggccagggtgccgacaccgtgttctcgcaaatggtggcagaaaccgtgggagttccggtcagcgatgttcacgttatttcaacccaagataccgacgttacaccattcgaccccggcgcatttgcctcacgtcagagctatgttgccgcgcctgcgctgcgcagtgcagcactgttattaaaagagaaaatcatcgctcacgccgcagtcatgctacatcagtcagcgatgaatctgaccctgataaaaggccatatcgtgctgattgaaagaccggaagaaccgttaatgtcgttaaaagatttggcgatggacgctttctaccaccctgaacgcggcgggcagctctctgccgaaagctccatcaaaaccaccactaacccaccggcgtttggctgtacctttgttgatctgacggtcgatattgcactgtgcaaagtcaccatcaaccgcatcctcaacgttcatgattcgggccatattcttaatccgctgctggcagaaggtcaggtacacggcggaatgggaatgggcattggctgggcgctatttgaagagatgatcatcgatgcgaaaagcggcgtggtccgtaaccccaatctgctggattacaaaatgccgaccatgccggatctgccacaactggaaagcgcgttcgtcgaaatcaatgagccgcaatcagcatacggacataagtcactgggtgagccccccataattcctgtagccgctgctattcgtaacgcggtgaagatggctaccggtgttgcaatcaatacactgccgctaacgccaaaacgattatatgaagaattccatctggcaggattgatttgaggataacatcatgtttgattttgcttcttaccatcgcgcaaccacccttgccgatgccatcaccctgctggctgacaatccgcaggccaaattgcttgccggtggcactgacgtactgatacagcttcaccatcacaatgaccgctatcgccatattgttgatatccacaatctggcagagcttcagggaataacacaggcggaagatggcgcgctgcgaatcggctctgcgacaacatttactcagctcattgaagatcccgtaatccaacgcaatctcccggcgttatgtgctgcggctgcatcaatcgccgggccgcagatccgtaatgtcgccacctacggcggaaatatttgcaacggtgccaccagcgcagattctgccacgccaacgctaatttatgacgcgaaactggagctccactccccacgcggtgttcgtttcgtcccgattaatggctttcacaccgggccgggcaaagtgtctcttgagcatgacgaaatccttgtcgcctttcattttccgccacagccgaaagaacacgcgggcagcgcgcattttaaatatgccatgcgcgacgcaatggatatttcaacaattggctgcgccgcacattgccgactggataacggcaatttcagcgaattacgcctggcatttggtgttgccgcgccaacgccgattcgctgccaacatgccgaacagactgcacaaaatgcgccattaaacctgcaaacgctggaagccatcagcgaatcagtcctgcaagatgtcgccccgcgttcttcatggcgggccagtaaagagtttcgtctgcatctcatccagacgatgaccaaaaaagtgattagcgaagccgtcgccgcggcggggggaaaattgcaatgaatcacagcgaaacaattaccatcgaatgcaccattaacgggatgccttttcagcttcacgccgcgccaggaatgccgctttcggaactactccgagaacaagggcttcttagtgtcaaacaaggttgctgcgtaggcgaatgcggtgcctgtacggtgctggtcgacggcactgcgatagacagttgcttattccttgcgacctgggctgaaggaaaagagatccgcacgctggaaggtgaagcgaaaggcggtaaactttctcatgtccaactggcttatgcgaaatctggtgcagtgcaatgcgggttttgtacgccgggcctgattatggctaccacggcgatgctggcaaaaccacgcgaaaaaccattaaccattacggaaattcgtcgtggactggcgggaaatctttgtcgctgcacggggtatcagatgattgtaaatacagttctggattgcgagaaaacgaagtaa

SEQ ID NO: 859 - DNA, 3624 bp, Artificial Sequence
  source: /note="Description of Artificial Sequence: Synthetic polynucleotide"
  source: /note="xdhABC"
atgcgcgtcgatgccattgctaaggtcaccgggcgggcacgatatactgacgattatattatggcgggcatgtgttacgcgaaatatgtacgtagccctatcgcacatggttatgctgtaaatattaatgatgaacaagccaggagtttgccgggcgtcctggcgatttttacctgggaagatgtgccagaaatcccattcgccacggcagggcatgcctggacacttgacgaaaacaagcgcgataccgccgatcgtgccctgctaacgcgtcatgttcgtcatcatggtgacgccgttgccatcgtcgtggcccgcgatgaactcacggcagaaaaagcggcgcaattggtcagcattgagtggcaagaattacccgttatcacctcgccagaagcggcgctggcagaagacgctgcaccaatccataacggtggcaatttactgaaacaaagcacgatgtcgacgggtaatgtccaacaaacaatcgatgccgccgactaccaggtacaggggcactatcagactcccgttattcaacattgtcatatggaaagcgtgacatcgctggcatggatggaggatgactcgcgaattaccatcgtttccagcacccagatcccgcacattgttcgccgcgtggttggtcaggcgctggatattccctggtcatgcgtacgagtcatcaaaccgtttatcggtggcggttttggtaataaacaggatgtactggaagagccaatggcggcattcctgaccagcaaacttggcggcattccggtgaaagtttcccttagccgtgaagagtgtttcctcgcaacccgtacccgccacgcttttactattgacgggcaaatgggcgtgaaccgcgacggaacattgaaaggttatagtctggatgttctgtctaacaccggcgcttatgcatctcacgggcactccattgcttctgctggggggaataaagtcgcttacctttatcctcgttgtgcctacgcttacagttcaaagacctgctataccaacctcccctcggctggtgcgatgcgtggttatggcgcgccacaagtcgtatttgccgttgagtctatgcttgatgatgccgcgacagcgttaggtattgatcctgttgaaattcgtttacgcaacgccgcccgcgaaggagatgctaatccgctcacgggaaaacgtatttacagcgcagggttgccggagtgtcttgaaaaaggccggaaaatctttgaatgggaaaaacgccgtgcagagtgccagaaccagcaaggcaatttacgtcgtggcgttggcgtcgcctgttttagctacacctctaacacctggcctgtcggcgtagaaatagcaggcgcgcgcctgttgatgaatcaggatggaaccatcaacgtgcaaagcggcgcgacggaaatcggccagggtgccgacaccgtgttctcgcaaatggtggcagaaaccgtgggagttccggtcagcgatgttcacgttatttcaacccaagataccgacgttacaccattcgaccccggcgcatttgcctcacgtcagagctatgttgccgcgcctgcgctgcgcagtgcagcactgttattaaaagagaaaatcatcgctcacgccgcagtcatgctacatcagtcagcgatgaatctgaccctgataaaaggccatatcgtgctgattgaaagaccggaagaaccgttaatgtcgttaaaagatttggcgatggacgctttctaccaccctgaacgcggcgggcagctctctgccgaaagctccatcaaaaccaccactaacccaccggcgtttggctgtacctttgttgatctgacggtcgatattgcactgtgcaaagtcaccatcaaccgcatcctcaacgttcatgattcgggccatattcttaatccgctgctggcagaaggtcaggtacacggcggaatgggaatgggcattggctgggcgctatttgaagagatgatcatcgatgcgaaaagcggcgtggtccgtaaccccaatctgctggattacaaaatgccgaccatgccggatctgccacaactggaaagcgcgttcgtcgaaatcaatgagccgcaatcagcatacggacataagtcactgggtgagccccccataattcctgtagccgctgctattcgtaacgcggtgaagatggctaccggtgttgcaatcaatacactgccgctaacgccaaaacgattatatgaagaattccatctggcaggattgatttgaggataacatcatgtttgattttgcttcttaccatcgcgcaaccacccttgccgatgccatcaccctgctggctgacaatccgcaggccaaattgcttgccggtggcactgacgtactgatacagcttcaccatcacaatgaccgctatcgccatattgttgatatccacaatctggcagagcttcagggaataacacaggcggaagatggcgcgctgcgaatcggctctgcgacaacatttactcagctcattgaagatcccgtaatccaacgcaatctcccggcgttatgtgctgcggctgcatcaatcgccgggccgcagatccgtaatgtcgccacctacggcggaaatatttgcaacggtgccaccagcgcagattctgccacgccaacgctaatttatgacgcgaaactggagctccactccccacgcggtgttcgtttcgtcccgattaatggctttcacaccgggccgggcaaagtgtctcttgagcatgacgaaatccttgtcgcctttcattttccgccacagccgaaagaacacgcgggcagcgcgcattttaaatatgccatgcgcgacgcaatggatatttcaacaattggctgcgccgcacattgccgactggataacggcaatttcagcgaattacgcctggcatttggtgttgccgcgccaacgccgattcgctgccaacatgccgaacagactgcacaaaatgcgccattaaacctgcaaacgctggaagccatcagcgaatcagtcctgcaagatgtcgccccgcgttcttcatggcgggccagtaaagagtttcgtctgcatctcatccagacgatgaccaaaaaagtgattagcgaagccgtcgccgcggcggggggaaaattgcaatgaatcacagcgaaacaattaccatcgaatgcaccattaacgggatgccttttcagcttcacgccgcgccaggaatgccgctttcggaactactccgagaacaagggcttcttagtgtcaaacaaggttgctgcgtaggcgaatgcggtgcctgtacggtgctggtcgacggcactgcgatagacagttgcttattccttgcgacctgggctgaaggaaaagagatccgcacgctggaaggtgaagcgaaaggcggtaaactttctcatgtccaactggcttatgcgaaatctggtgcagtgcaatgcgggttttgtacgccgggcctgattatggctaccacggcgatgctggcaaaaccacgcgaaaaaccattaaccattacggaaattcgtcgtggactggcgggaaatctttgtcgctgcacggggtatcagatgattgtaaatacagttctggattgcgagaaaacgaagtaa

SEQ ID NO: 860 - DNA, 2803 bp, Artificial Sequence
  source: /note="Description of Artificial Sequence: Synthetic polynucleotide"
  source: /note="PfnrS-add-xapA-deoD"
ggtaccagttgttcttattggtggtgttgctttatggttgcatcgtagtaaatggttgtaacaaaagcaatttttccggctgtctgtatacaaaaacgccgtaaagtttgagcgaagtcaataaactctctacccattcagggcaatatctctcttggatccaaagtgaactctagaaataattttgtttaactttaagaaggagatatacatatgattgataccaccctgccattaactgatatccatcgccaccttgatggcaacattcgtccccagaccattcttgaacttggccgccagtataatatctcgcttcctgcacaatccctggaaacactgattccccacgttcaggtcattgccaacgaacccgatctggtgagctttctgactaaacttgactggggcgttaaagttctcgcctctcttgatgcctgccgccgcgtggcatttgaaaacattgaagatgcagcccgtaacggcctgcactatgtcgagctgcgtttttcaccaggctacatggcaatggcacatcagctgcctgtagcgggtgttgtcgaagcggtgatcgatggcgtacgtgaaggttgccgcacctttggtgtgcaggcgaagcttatcggtattatgagccggaccttcggcgaagccgcctgtcagcaagagctggaggcctttttagcccaccgtgaccagattaccgcacttgatttagccggtgatgaacttggtttcccgggaagtctgttcctttctcatttcaaccgcgcgcgtgatgcgggctggcatattaccgtccatgcaggcgaagctgccggaccggaaagcatctggcaggcgattcgtgaactgggggcggagcgtattggacatggcgtaaaagccattgaagatcgggcgctgatggattttctcgccgagcaacaaattggtattgaatcctgtctgacctccaatattcagaccagcaccgtggcggatctggctgcacatccgctgaaaacgttccttgagcatggcattcgtgccagcattaacactgacgatccaggcgtgcagggagtggatatcattcacgaatataccgttgccgcgccagctgctgggttatcccgcgagcaaatccgccaggcacagattaatggtctggaaatggctttcctcagcgcagaggaaaaacgcgcactgcgagaaaaagtcgccgcgaagtaaaagaaggagatatacatatgtatcaggctcagttttctcataacccactgtattgcgtagatattatcaagacttataaacctgatttcacgccacgagtggcctttattttaggttccgggctgggcgcgctggccgatcagattgagaacgcggtcgcaatttcctacgaaaagctgcctgggttcccggtaagtaccgtacacggtcatgcgggtgagctggtgctgggttatctccagggggtgccagtggcgtgtatgaaaggtcgcggacatttctacgaaggtcgtgggatgaccatcatgacggatgcaatccgtacctttaagttgctgggctgcgagttgctgttctgcaccaatgcggctggctcactgcgccctgaagtgggggccggcagtctggtcgcattgaaagatcacatcaacaccatgccgggaacgccgatggtgggtcttaatgatgaacgttttggtgagcgcttcttctcgctggcgaatgcctacgatgcggaataccgcgcactgttacaaaaagtggcgaaagaagaggggttccctctgacggagggcgtgttcgtctcatatccggggccgaatttcgagactgcggcggaaattcgcatgatgcaaattattggtggggatgttgttggtatgtctgtggtgcctgaggttatttcagctcgccattgcgaacttaaagtcgttgcggtctctgcgattaccaacatggcggaaggtctgagtgacgtgaagctttctcatgcccaaacgctggcagcagcggaactctcaaagcaaaactttattaatcttatttgcggctttctgcgcaaaattgcctgaaagaaggagatatacatatggctaccccacacattaatgcagaaatgggcgatttcgctgacgtagttttgatgccaggcgacccgctgcgtgcgaagtatattgctgaaactttccttgaagatgcccgtgaagtgaacaacgttcgcggtatgctgggcttcaccggtacttacaaaggccgcaaaatttccgtaatgggtcacggtatgggtatcccgtcctgctccatctacaccaaagaactgatcaccgatttcggcgtgaagaaaattatccgcgtgggttcctgtggcgcagttctgccgcacgtaaaactacgcgacgtcgttatcggtatgggtgcctgcaccgattccaaagttaaccgcatccgttttaaagaccatgactttgccgctatcgctgactttgacatggtgcgtaacgcggtagacgcggctaaagcactgggcgttgatgctcgcgtgggtaacctgttctccgctgacctgttctactctccggacggcgaaatgttcgacgtgatggaaaaatacggcatcctcggcgtggaaatggaagcggctggtatctacggcgtcgctgcagaatttggcgcgaaagccctgaccatctgcaccgtgtctgaccacatccgcactcacgagcagaccactgccgctgagcgtcagaccaccttcaacgacatgatcaaaatcgcactggaatccgttctgctgggcgataaagagtaa

SEQ ID NO: 861 - DNA, 2633 bp, Artificial Sequence
  source: /note="Description of Artificial Sequence: Synthetic polynucleotide"
  source: /note="add-xapA-deoD"
ctctagaaataattttgtttaactttaagaaggagatatacatatgattgataccaccctgccattaactgatatccatcgccaccttgatggcaacattcgtccccagaccattcttgaacttggccgccagtataatatctcgcttcctgcacaatccctggaaacactgattccccacgttcaggtcattgccaacgaacccgatctggtgagctttctgactaaacttgactggggcgttaaagttctcgcctctcttgatgcctgccgccgcgtggcatttgaaaacattgaagatgcagcccgtaacggcctgcactatgtcgagctgcgtttttcaccaggctacatggcaatggcacatcagctgcctgtagcgggtgttgtcgaagcggtgatcgatggcgtacgtgaaggttgccgcacctttggtgtgcaggcgaagcttatcggtattatgagccggaccttcggcgaagccgcctgtcagcaagagctggaggcctttttagcccaccgtgaccagattaccgcacttgatttagccggtgatgaacttggtttcccgggaagtctgttcctttctcatttcaaccgcgcgcgtgatgcgggctggcatattaccgtccatgcaggcgaagctgccggaccggaaagcatctggcaggcgattcgtgaactgggggcggagcgtattggacatggcgtaaaagccattgaagatcgggcgctgatggattttctcgccgagcaacaaattggtattgaatcctgtctgacctccaatattcagaccagcaccgtggcggatctggctgcacatccgctgaaaacgttccttgagcatggcattcgtgccagcattaacactgacgatccaggcgtgcagggagtggatatcattcacgaatataccgttgccgcgccagctgctgggttatcccgcgagcaaatccgccaggcacagattaatggtctggaaatggctttcctcagcgcagaggaaaaacgcgcactgcgagaaaaagtcgccgcgaagtaaaagaaggagatatacatatgtatcaggctcagttttctcataacccactgtattgcgtagatattatcaagacttataaacctgatttcacgccacgagtggcctttattttaggttccgggctgggcgcgctggccgatcagattgagaacgcggtcgcaatttcctacgaaaagctgcctgggttcccggtaagtaccgtacacggtcatgcgggtgagctggtgctgggttatctccagggggtgccagtggcgtgtatgaaaggtcgcggacatttctacgaaggtcgtgggatgaccatcatgacggatgcaatccgtacctttaagttgctgggctgcgagttgctgttctgcaccaatgcggctggctcactgcgccctgaagtgggggccggcagtctggtcgcattgaaagatcacatcaacaccatgccgggaacgccgatggtgggtcttaatgatgaacgttttggtgagcgcttcttctcgctggcgaatgcctacgatgcggaataccgcgcactgttacaaaaagtggcgaaagaagaggggttccctctgacggagggcgtgttcgtctcatatccggggccgaatttcgagactgcggcggaaattcgcatgatgcaaattattggtggggatgttgttggtatgtctgtggtgcctgaggttatttcagctcgccattgcgaacttaaagtcgttgcggtctctgcgattaccaacatggcggaaggtctgagtgacgtgaagctttctcatgcccaaacgctggcagcagcggaactctcaaagcaaaactttattaatcttatttgcggctttctgcgcaaaattgcctgaaagaaggagatatacatatggctaccccacacattaatgcagaaatgggcgatttcgctgacgtagttttgatgccaggcgacccgctgcgtgcgaagtatattgctgaaactttccttgaagatgcccgtgaagtgaacaacgttcgcggtatgctgggcttcaccggtacttacaaaggccgcaaaatttccgtaatgggtcacggtatgggtatcccgtcctgctccatctacaccaaagaactgatcaccgatttcggcgtgaagaaaattatccgcgtgggttcctgtggcgcagttctgccgcacgtaaaactacgcgacgtcgttatcggtatgggtgcctgcaccgattccaaagttaaccgcatccgttttaaagaccatgactttgccgctatcgctgactttgacatggtgcgtaacgcggtagacgcggctaaagcactgggcgttgatgctcgcgtgggtaacctgttctccgctgacctgttctactctccggacggcgaaatgttcgacgtgatggaaaaatacggcatcctcggcgtggaaatggaagcggctggtatctacggcgtcgctgcagaatttggcgcgaaagccctgaccatctgcaccgtgtctgaccacatccgcactcacgagcagaccactgccgctgagcgtcagaccaccttcaacgacatgatcaaaatcgcactggaatccgttctgctgggcgataaagagtaa

SEQ ID NO: 862 - DNA, 1053 bp, Artificial Sequence
  source: /note="Description of Artificial Sequence: Synthetic polynucleotide"
  source: /note="fbrAroG"
atgaattatcagaacgacgatttacgcatcaaagaaatcaaagagttacttcctcctgtcgcattgctggaaaaattccccgctactgaaaatgccgcgaatacggtcgcccatgcccgaaaagcgatccataagatcctgaaaggtaatgatgatcgcctgttggtggtgattggcccatgctcaattcatgatcctgtcgcggctaaagagtatgccactcgcttgctgacgctgcgtgaagagctgcaagatgagctggaaatcgtgatgcgcgtctattttgaaaagccgcgtactacggtgggctggaaagggctgattaacgatccgcatatggataacagcttccagatcaacgacggtctgcgtattgcccgcaaattgctgctcgatattaacgacagcggtctgccagcggcgggtgaattcctggatatgatcaccctacaatatctcgctgacctgatgagctggggcgcaattggcgcacgtaccaccgaatcgcaggtgcaccgcgaactggcgtctggtctttcttgtccggtaggtttcaaaaatggcactgatggtacgattaaagtggctatcgatgccattaatgccgccggtgcgccgcactgcttcctgtccgtaacgaaatgggggcattcggcgattgtgaataccagcggtaacggcgattgccatatcattctgcgcggcggtaaagagcctaactacagcgcgaagcacgttgctgaagtgaaagaagggctgaacaaagcaggcctgccagcgcaggtgatgatcgatttcagccatgctaactcgtcaaaacaattcaaaaagcagatggatgtttgtactgacgtttgccagcagattgccggtggcgaaaaggccattattggcgtgatggtggaaagccatctggtggaaggcaatcagagcctcgagagcggggaaccgctggcctacggtaagagcatcaccgatgcctgcattggctgggatgataccgatgctctgttacgtcaactggcgagtgcagtaaaagcgcgtcgcgggtaa

SEQ ID NO: 863 - DNA, 2351 bp, Artificial Sequence
  source: /note="Description of Artificial Sequence: Synthetic polynucleotide"
  source: /note="fbrAroG-serA"
ctctagaaataattttgtttaactttaagaaggagatatacatatgaattatcagaacgacgatttacgcatcaaagaaatcaaagagttacttcctcctgtcgcattgctggaaaaattccccgctactgaaaatgccgcgaatacggtcgcccatgcccgaaaagcgatccataagatcctgaaaggtaatgatgatcgcctgttggtggtgattggcccatgctcaattcatgatcctgtcgcggctaaagagtatgccactcgcttgctgacgctgcgtgaagagctgcaagatgagctggaaatcgtgatgcgcgtctattttgaaaagccgcgtactacggtgggctggaaagggctgattaacgatccgcatatggataacagcttccagatcaacgacggtctgcgtattgcccgcaaattgctgctcgatattaacgacagcggtctgccagcggcgggtgaattcctggatatgatcaccctacaatatctcgctgacctgatgagctggggcgcaattggcgcacgtaccaccgaatcgcaggtgcaccgcgaactggcgtctggtctttcttgtccggtaggtttcaaaaatggcactgatggtacgattaaagtggctatcgatgccattaatgccgccggtgcgccgcactgcttcctgtccgtaacgaaatgggggcattcggcgattgtgaataccagcggtaacggcgattgccatatcattctgcgcggcggtaaagagcctaactacagcgcgaagcacgttgctgaagtgaaagaagggctgaacaaagcaggcctgccagcgcaggtgatgatcgatttcagccatgctaactcgtcaaaacaattcaaaaagcagatggatgtttgtactgacgtttgccagcagattgccggtggcgaaaaggccattattggcgtgatggtggaaagccatctggtggaaggcaatcagagcctcgagagcggggaaccgctggcctacggtaagagcatcaccgatgcctgcattggctgggatgataccgatgctctgttacgtcaactggcgagtgcagtaaaagcgcgtcgcgggtaatacttaagaaggagatatacatatggcaaaggtatcgctggagaaagacaagattaagtttctgctggtagaaggcgtgcaccaaaaggcgctggaaagccttcgtgcagctggttacaccaacatcgaatttcacaaaggcgcgctggatgatgaacaattaaaagaatccatccgcgatgcccacttcatcggcctgcgatcccgtacccatctgactgaagacgtgatcaacgccgcagaaaaactggtcgctattggctgtttctgtatcggaacaaatcaggttgatctggatgcggcggcaaagcgcgggatcccggtatttaacgcaccgttctcaaatacgcgctctgttgcggagctggtgattggcgaactgctgctgctattgcgcggcgtgccagaagccaatgctaaagcgcatcgtggcgtgtggaacaaactggcggcgggttcttttgaagcgcgcggcaaaaagctgggtatcatcggctacggtcatattggtacgcaattgggcattctggctgaatcgctgggaatgtatgtttacttttatgatattgaaaacaaactgccgctgggcaacgccactcaggtacagcatctttctgacctgctgaatatgagcgatgtggtgagtctgcatgtaccagagaatccgtccaccaaaaatatgatgggcgcgaaagagatttcgctaatgaagcccggctcgctgctgattaatgcttcgcgcggtactgtggtggatattccagcgctgtgtgacgcgctggcgagcaaacatctggcgggggcggcaatcgacgtattcccgacggaaccggcgaccaatagcgatccatttacctctccgctgtgtgaattcgacaatgtccttctgacgccacacattggcggttcgactcaggaagcgcaggagaatatcggcttggaagttgcgggtaaattgatcaagtattctgacaatggctcaacgctctctgcggtgaacttcccggaagtctcgctgccactgcacggtgggcgtcgtctgatgcacatccacgaaaaccgtccgggcgtgctaactgcgctcaacaaaatttttgccgagcagggcgtcaacatcgccgcgcaatatctacaaacttccgcccagatgggttatgtagttattgatattgaagccgacgaagacgttgccgaaaaagcgctgcaggcaatgaaagctattccgggtaccattcgcgcccgtctgctgtactaa

SEQ ID NO: 864 - DNA, 1233 bp, Artificial Sequence
  source: /note="Description of Artificial Sequence: Synthetic polynucleotide"
  source: /note="SerA"
atggcaaaggtatcgctggagaaagacaagattaagtttctgctggtagaaggcgtgcaccaaaaggcgctggaaagccttcgtgcagctggttacaccaacatcgaatttcacaaaggcgcgctggatgatgaacaattaaaagaatccatccgcgatgcccacttcatcggcctgcgatcccgtacccatctgactgaagacgtgatcaacgccgcagaaaaactggtcgctattggctgtttctgtatcggaacaaatcaggttgatctggatgcggcggcaaagcgcgggatcccggtatttaacgcaccgttctcaaatacgcgctctgttgcggagctggtgattggcgaactgctgctgctattgcgcggcgtgccagaagccaatgctaaagcgcatcgtggcgtgtggaacaaactggcggcgggttcttttgaagcgcgcggcaaaaagctgggtatcatcggctacggtcatattggtacgcaattgggcattctggctgaatcgctgggaatgtatgtttacttttatgatattgaaaacaaactgccgctgggcaacgccactcaggtacagcatctttctgacctgctgaatatgagcgatgtggtgagtctgcatgtaccagagaatccgtccaccaaaaatatgatgggcgcgaaagagatttcgctaatgaagcccggctcgctgctgattaatgcttcgcgcggtactgtggtggatattccagcgctgtgtgacgcgctggcgagcaaacatctggcgggggcggcaatcgacgtattcccgacggaaccggcgaccaatagcgatccatttacctctccgctgtgtgaattcgacaatgtccttctgacgccacacattggcggttcgactcaggaagcgcaggagaatatcggcttggaagttgcgggtaaattgatcaagtattctgacaatggctcaacgctctctgcggtgaacttcccggaagtctcgctgccactgcacggtgggcgtcgtctgatgcacatccacgaaaaccgtccgggcgtgctaactgcgctcaacaaaatttttgccgagcagggcgtcaacatcgccgcgcaatatctacaaacttccgcccagatgggttatgtagttattgatattgaagccgacgaagacgttgccgaaaaagcgctgcaggcaatgaaagctattccgggtaccattcgcgcccgtctgctgtactaa

SEQ ID NO: 865 - DNA, 1424 bp, Artificial Sequence
  source: /note="Description of Artificial Sequence: Synthetic polynucleotide"
  source: /note="Ptet-kynU(Pseudomonas)"
atctaatctagacatcattaattcctaatttttgttgacactctatcattgatagagttattttaccactccctatcagtgatagagaaaagtgaattatataaaagtgggaggtgcccgaatgacgacccgaaatgattgcctagcgttggatgcacaggacagtctggctccgctgcgccaacaatttgcgctgccggagggtgtgatatacctggatggcaattcgctgggcgcacgtccggtagctgcgctggctcgcgcgcaggctgtgatcgcagaagaatggggcaacgggttgatccgttcatggaactctgcgggctggcgtgatctgtctgaacgcctgggtaatcgcctggctaccctgattggtgcgcgcgatggggaagtagttgttactgataccacctcgattaatctgtttaaagtgctgtcagcggcgctgcgcgtgcaagctacccgtagcccggagcgccgtgttatcgtgactgagacctcgaatttcccgaccgacctgtatattgcggaagggttggcggatatgctgcaacaaggttacactctgcgtttggtggattcaccggaagagctgccacaggctatagatcaggacaccgcggtggtgatgctgacgcacgtaaattataaaaccggttatatgcacgacatgcaggctctgaccgcgttgagccacgagtgtggggctctggcgatttgggatctggcgcactctgctggcgctgtgccggtggacctgcaccaagcgggcgcggactatgcgattggctgcacgtacaaatacctgaatggcggcccgggttcgcaagcgtttgtttgggtttcgccgcaactgtgcgacctggtaccgcagccgctgtctggttggttcggccatagtcgccaattcgcgatggagccgcgctacgaaccttctaacggcattgctcgctatctgtgcggcactcagcctattactagcttggctatggtggagtgcggcctggatgtgtttgcgcagacggatatggcttcgctgcgccgtaaaagtctggcgctgactgatctgttcatcgagctggttgaacaacgctgcgctgcacacgaactgaccctggttactccacgtgaacacgcgaaacgcggctctcacgtgtcttttgaacaccccgagggttacgctgttattcaagctctgattgatcgtggcgtgatcggcgattaccgtgagccacgtattatgcgtttcggtttcactcctctgtatactacttttacggaagtttgggatgcagtacaaatcctgggcgaaatcctggatcgtaagacttgggcgcaggctcagtttcaggtgcgccactctgttacttaaaaataaaacgaaaggctcagtcgaaagactgggcctttcgttttatctgttg

SEQ ID NO: 866 - DNA, 1571 bp, Artificial Sequence
  source: /note="Description of Artificial Sequence: Synthetic polynucleotide"
  source: /note="Ptet-kynU(Human)"
atctaatctagacatcattaattcctaatttttgttgacactctatcattgatagagttattttaccactccctatcagtgatagagaaaagtgaatatcaagacacgaggaggtaagattatggagccttcatctttagaactgccagcggacacggtgcagcgcatcgcggcggaactgaagtgccatccgactgatgagcgtgtggcgctgcatctggacgaagaagataaactgcgccactttcgtgaatgtttttatattcctaaaattcaagacttgccgccggtagatttgagtctcgttaacaaagatgaaaacgcgatctactttctgggcaactctctgggtctgcaaccaaaaatggttaaaacgtacctggaggaagaactggataaatgggcaaaaatcgcggcttatggtcacgaagtgggcaagcgtccttggattactggcgacgagtctattgtgggtttgatgaaagatattgtgggcgcgaatgaaaaggaaattgcactgatgaatgctctgaccgttaatctgcacctgctgatgctgtctttttttaaaccgaccccgaaacgctacaaaatactgctggaagcgaaagcgtttccgtcggatcactatgctatagaaagtcaactgcagttgcatggtctgaatatcgaggaatctatgcgcatgattaaaccgcgtgagggtgaagaaacgctgcgtattgaagacattctggaagttattgaaaaagaaggtgattctatcgcagttatactgttttctggcgtgcacttttatacaggtcagcacttcaatatcccggcaatcactaaagcggggcaggcaaaaggctgctatgttggttttgacctggcgcatgcagtggggaatgttgaactgtatctgcacgattggggcgttgatttcgcgtgttggtgtagctacaaatatctgaacgctggcgcgggtggcattgctggcgcttttattcacgaaaaacacgcgcacaccattaaaccggctctggttggctggttcggtcatgagctgagtactcgctttaaaatggataacaaactgcaattgattccgggtgtttgcggcttccgtatcagcaatccgccgattctgctggtttgcagcctgcacgctagtctggaaatctttaagcaggcgactatgaaagcgctgcgcaaaaaatctgtgctgctgaccggctatctggagtatctgatcaaacacaattatggcaaagataaagctgcaactaaaaaaccggtagtgaacattatcaccccctcacacgtggaggagcgcggttgtcagctgactattactttcagtgtacctaataaagatgtgttccaggaactggaaaaacgcggcgttgtttgtgataaacgtaacccgaatggtattcgcgtggctcctgtgccgctgtacaattcattccacgatgtttataaattcaccaacctgctgacttctattctcgacagtgctgagactaaaaattaaaaataaaacgaaaggctcagtcgaaagactgggcctttcgttttatctgttg

SEQ ID NO: 867 - DNA, 1310 bp, Artificial Sequence
  source: /note="Description of Artificial Sequence: Synthetic polynucleotide"
  source: /note="ptet-kynU(Shewanella)"
atctaatctagacatcattaattcctaatttttgttgacactctatcattgatagagttattttaccactccctatcagtgatagagaaaagtgaatggttcaccaccacaaggagggattatgctgctgaatgtaaaacaggacttttgcctggcaggcccgggctacctgctgaatcactcggttggccgtccgctgaaatcaactgagcaagcgctgaaacaagcattttttgctccgtggcaagagagcggtcgtgaaccgtggggccagtggctgggtgttattgataatttcactgctgcgctggcatctctgtttaatggtcaaccgcaggatttttgtccgcaggttaacctgagcagcgcgctgactaaaattgtgatgtcactggatcgtctgactcgcgatctgacccgcaatggcggtgctgttgtgctgatgtctgaaatcgatttcccatctatgggcttcgcgttgaaaaaagcgctgccagcgagctgcgaactgcgttttatcccgaaaagtctggacgtgactgatccgaacgtatgggatgcacacatctgtgatgatgtagacctggtttttgtgtctcacgcctatagtaatacgggccaacaggctccgctggcgcaaatcatctctctggcgcgtgaacgtggctgcctgtcactggtggatgtagcgcaatcagcggggattttgccgctggatctggcgaaactgcaaccggacttcatgatcggcagttcggttaaatggctgtgctcgggccctggtgcggcatatctgtgggttaatccggcgattctgccggaatgtcagccgcaggatgtgggctggttttcacatgagaatccctttgaattcgacatccacgatttccgctaccacccgactgcactgcgcttttggggtggtacgccgtcgatcgcgccttatgcgatcgcggcgcactcgatcgaatattttgccaatatcggctcgcaagtgatgcgtgaacacaacctgcaactgatggaaccggtggttcaggcgctggacaatgaactggtgagcccgcaggaagtggataaacgctcaggcactattattctgcaattcggtgaacgtcaaccgcaaattctggcggctctggctgcggcgaacatttcggtggacactcgttctttggggattcgtgttagtccgcacatttataatgatgaggcggacattgcgcgcctgctgggtgtgatcaaagcaaatcgctaaaaataaaacgaaaggctcagtcgaaagactgggcctttcgttttatctgttg

SEQ ID NO: 868 - DNA, 1096 bp, Artificial Sequence
  source: /note="Description of Artificial Sequence: Synthetic polynucleotide"
  source: /note="fbrAroG"
ctctagaaataattttgtttaactttaagaaggagatatacatatgaattatcagaacgacgatttacgcatcaaagaaatcaaagagttacttcctcctgtcgcattgctggaaaaattccccgctactgaaaatgccgcgaatacggtcgcccatgcccgaaaagcgatccataagatcctgaaaggtaatgatgatcgcctgttggtggtgattggcccatgctcaattcatgatcctgtcgcggctaaagagtatgccactcgcttgctgacgctgcgtgaagagctgcaagatgagctggaaatcgtgatgcgcgtctattttgaaaagccgcgtactacggtgggctggaaagggctgattaacgatccgcatatggataacagcttccagatcaacgacggtctgcgtattgcccgcaaattgctgctcgatattaacgacagcggtctgccagcggcgggtgaattcctggatatgatcaccctacaatatctcgctgacctgatgagctggggcgcaattggcgcacgtaccaccgaatcgcaggtgcaccgcgaactggcgtctggtctttcttgtccggtaggtttcaaaaatggcactgatggtacgattaaagtggctatcgatgccattaatgccgccggtgcgccgcactgcttcctgtccgtaacgaaatgggggcattcggcgattgtgaataccagcggtaacggcgattgccatatcattctgcgcggcggtaaagagcctaactacagcgcgaagcacgttgctgaagtgaaagaagggctgaacaaagcaggcctgccagcgcaggtgatgatcgatttcagccatgctaactcgtcaaaacaattcaaaaagcagatggatgtttgtactgacgtttgccagcagattgccggtggcgaaaaggccattattggcgtgatggtggaaagccatctggtggaaggcaatcagagcctcgagagcggggaaccgctggcctacggtaagagcatcaccgatgcctgcattggctgggatgataccgatgctctgttacgtcaactggcgagtgcagtaaaagcgcgtcgcgggtaa

SEQ ID NO: 869 - DNA, 28 bp, Artificial Sequence
  source: /note="Description of Artificial Sequence: Synthetic oligonucleotide"
  source: /note="BBa_J61133"
tctagagaaagacccgagacactagatg

SEQ ID NO: 870 - DNA, 28 bp, Artificial Sequence
  source: /note="Description of Artificial Sequence: Synthetic oligonucleotide"
  source: /note="BBa_J61134"
tctagagaaagaccggaaatactagatg

SEQ ID NO: 871 - DNA, 28 bp, Artificial Sequence
  source: /note="Description of Artificial Sequence: Synthetic oligonucleotide"
  source: /note="BBa_J61135"
tctagagaaagaccggagacactagatg

SEQ ID NO: 872 - DNA, 6573 bp, Artificial Sequence
  source: /note="Description of Artificial Sequence: Synthetic polynucleotide"
  source: /note="TrpEDCBA"
ctctagaaataattttgtttaactttaagaaggagatatacatatgcaaacacaaaaaccgactctcgaactgctaacctgcgaaggcgcttatcgcgacaacccgactgcgctttttcaccagttgtgtggggatcgtccggcaacgctgctgctggaatccgcagatatcgacagcaaagatgatttaaaaagcctgctgctggtagacagtgcgctgcgcattacagcattaagtgacactgtcacaatccaggcgctttccggcaatggagaagccctgttgacactactggataacgccttgcctgcgggtgtggaaaatgaacaatcaccaaactgccgcgtactgcgcttcccgcctgtcagtccactgctggatgaagacgcccgcttatgctccctttcggtttttgacgctttccgcttattacagaatctgttgaatgtaccgaaggaagaacgagaagcaatgttcttcggcggcctgttctcttatgaccttgtggcgggatttgaaaatttaccgcaactgtcagcggaaaatagctgccctgatttctgtttttatctcgctgaaacgctgatggtgattgaccatcagaaaaaaagcactcgtattcaggccagcctgtttgctccgaatgaagaagaaaaacaacgtctcactgctcgcctgaacgaactacgtcagcaactgaccgaagccgcgccgccgctgccggtggtttccgtgccgcatatgcgttgtgaatgtaaccagagcgatgaagagttcggtggtgtagtgcgtttgttgcaaaaagcgattcgcgccggagaaattttccaggtggtgccatctcgccgtttctctctgccctgcccgtcaccgctggcagcctattacgtgctgaaaaagagtaatcccagcccgtacatgttttttatgcaggataatgatttcaccctgtttggcgcgtcgccggaaagttcgctcaagtatgacgccaccagccgccagattgagatttacccgattgccggaacacgtccacgcggtcgtcgtgccgatggttcgctggacagagacctcgacagccgcatcgaactggagatgcgtaccgatcataaagagctttctgaacatctgatgctggtggatctcgcccgtaatgacctggcacgcatttgcacacccggcagccgctacgtcgccgatctcaccaaagttgaccgttactcttacgtgatgcacctagtctcccgcgttgttggtgagctgcgccacgatctcgacgccctgcacgcttaccgcgcctgtatgaatatggggacgttaagcggtgcaccgaaagtacgcgctatgcagttaattgccgaagcagaaggtcgtcgacgcggcagctacggcggcgcggtaggttattttaccgcgcatggcgatctcgacacctgcattgtgatccgctcggcgctggtggaaaacggtatcgccaccgtgcaagccggtgctggcgtagtccttgattctgttccgcagtcggaagccgacgaaactcgtaataaagcccgcgctgtactgcgcgctattgccaccgcgcatcatgcacaggagacgttctaatggctgacattctgctgctcgataatatcgactcttttacgtacaacctggcagatcagttgcgcagcaatggtcataacgtggtgatttaccgcaaccatattccggcgcagaccttaattgaacgcctggcgacgatgagcaatccggtgctgatgctttctcctggccccggtgtgccgagcgaagccggttgtatgccggaactcctcacccgcttgcgtggcaagctgccaattattggcatttgcctcggacatcaggcgattgtcgaagcttacgggggctatgtcggtcaggcgggcgaaattcttcacggtaaagcgtcgagcattgaacatgacggtcaggcgatgtttgccggattaacaaacccgctgccagtggcgcgttatcactcgctggttggcagtaacattccggccggtttaaccatcaacgcccattttaatggcatggtgatggcggtgcgtcacgatgcagatcgcgtttgtggattccagttccatccggaatccattcttactacccagggcgctcgcctgctggaacaaacgctggcctgggcgcagcagaaactagagccaaccaacacgctgcaaccgattctggaaaaactgtatcaggcacagacgcttagccaacaagaaagccaccagctgttttcagcggtggtacgtggcgagctgaagccggaacaactggcggcggcgctggtgagcatgaaaattcgcggtgaacacccgaacgagatcgccggggcagcaaccgcgctactggaaaacgccgcgccattcccgcgcccggattatctgtttgccgatatcgtcggtactggcggtgacggcagcaacagcatcaatatttctaccgccagtgcgtttgtcgccgcggcctgcgggctgaaagtggcgaaacacggcaaccgtagcgtctccagtaaatccggctcgtcggatctgctggcggcgttcggtattaatcttgatatgaacgccgataaatcgcgccaggcgctggatgagttaggcgtctgtttcctctttgcgccgaagtatcacaccggattccgccatgcgatgccggttcgccagcaactgaaaacccgcactctgttcaacgtgctgggaccattgattaacccggcgcatccgccgctggcgctaattggtgtttatagtccggaactggtgctgccgattgccgaaaccttgcgcgtgctggggtatcaacgcgcggcagtggtgcacagcggcgggatggatgaagtttcattacacgcgccgacaatcgttgccgaactacatgacggcgaaattaagagctatcaattgaccgctgaagattttggcctgacaccctaccaccaggagcaattggcaggcggaacaccggaagaaaaccgtgacattttaacacgcttgttacaaggtaaaggcgacgccgcccatgaagcagccgtcgcggcgaatgtcgccatgttaatgcgcctgcatggccatgaagatctgcaagccaatgcgcaaaccgttcttgaggtactgcgcagtggttccgcttacgacagagtcaccgcactggcggcacgagggtaaatgatgcaaaccgttttagcgaaaatcgtcgcagacaaggcgatttgggtagaaacccgcaaagagcagcaaccgctggccagttttcagaatgaggttcagccgagcacgcgacatttttatgatgcacttcagggcgcacgcacggcgtttattctggagtgtaaaaaagcgtcgccgtcaaaaggcgtgatccgtgatgatttcgatccggcacgcattgccgccatttataaacattacgcttcggcaatttcagtgctgactgatgagaaatattttcaggggagctttgatttcctccccatcgtcagccaaatcgccccgcagccgattttatgtaaagacttcattatcgatccttaccagatctatctggcgcgctattaccaggccgatgcctgcttattaatgctttcagtactggatgacgaacaatatcgccagcttgcagccgtcgcccacagtctggagatgggtgtgctgaccgaagtcagtaatgaagaggaactggagcgcgccattgcattgggggcaaaggtcgttggcatcaacaaccgcgatctgcgcgatttgtcgattgatctcaaccgtacccgcgagcttgcgccgaaactggggcacaacgtgacggtaatcagcgaatccggcatcaatacttacgctcaggtgcgcgagttaagccacttcgctaacggctttctgattggttcggcgttgatggcccatgacgatttgaacgccgccgtgcgtcgggtgttgctgggtgagaataaagtatgtggcctgacacgtgggcaagatgctaaagcagcttatgacgcgggcgcgatttacggtgggttgatttttgttgcgacatcaccgcgttgcgtcaacgttgaacaggcgcaggaagtgatggctgcagcaccgttgcagtatgttggcgtgttccgcaatcacgatattgccgatgtggcggacaaagctaaggtgttatcgctggcggcagtgcaactgcatggtaatgaagatcagctgtatatcgacaatctgcgtgaggctctgccagcacacgtcgccatctggaaggctttaagtgtcggtgaaactcttcccgcgcgcgattttcagcacatcgataaatatgtattcgacaacggtcagggcgggagcggacaacgtttcgactggtcactattaaatggtcaatcgcttggcaacgttctgctggcggggggcttaggcgcagataactgcgtggaagcggcacaaaccggctgcgccgggcttgattttaattctgctgtagagtcgcaaccgggtatcaaagacgcacgtcttttggcctcggttttccagacgctgcgcgcatattaaggaaaggaacaatgacaacattacttaacccctattttggtgagtttggcggcatgtacgtgccacaaatcctgatgcctgctctgcgccagctggaagaagcttttgtcagcgcgcaaaaagatcctgaatttcaggctcagttcaacgacctgctgaaaaactatgccgggcgtccaaccgcgctgaccaaatgccagaacattacagccgggacgaacaccacgctgtatctgaagcgcgaagatttgctgcacggcggcgcgcataaaactaaccaggtgctcggtcaggctttactggcgaagcggatgggtaaaactgaaattattgccgaaaccggtgccggtcagcatggcgtggcgtcggcccttgccagcgccctgctcggcctgaaatgccgaatttatatgggtgccaaagacgttgaacgccagtcgcccaacgttttccggatgcgcttaatgggtgcggaagtgatcccggtacatagcggttccgcgaccctgaaagatgcctgtaatgaggcgctacgcgactggtccggcagttatgaaaccgcgcactatatgctgggtaccgcagctggcccgcatccttacccgaccattgtgcgtgagtttcagcggatgattggcgaagaaacgaaagcgcagattctggaaagagaaggtcgcctgccggatgccgttatcgcctgtgttggcggtggttcgaatgccatcggtatgtttgcagatttcatcaacgaaaccgacgtcggcctgattggtgtggagcctggcggccacggtatcgaaactggcgagcacggcgcaccgttaaaacatggtcgcgtgggcatctatttcggtatgaaagcgccgatgatgcaaaccgaagacgggcaaattgaagagtcttactccatttctgccgggctggatttcccgtccgtcggcccgcaacatgcgtatctcaacagcactggacgcgctgattacgtgtctattaccgacgatgaagccctggaagcctttaaaacgctttgcctgcatgaagggatcatcccggcgctggaatcctcccacgccctggcccatgcgctgaaaatgatgcgcgaaaatccggaaaaagagcagctactggtggttaacctttccggtcgcggcgataaagacatcttcaccgttcacgatattttgaaagcacgaggggaaatctgatggaacgctacgaatctctgtttgcccagttgaaggagcgcaaagaaggcgcattcgttcctttcgtcaccctcggtgatccgggcattgagcagtcgttgaaaattatcgatacgctaattgaagccggtgctgacgcgctggagttaggcatccccttctccgacccactggcggatggcccgacgattcaaaacgccacactgcgtgcttttgcggcgggagtaaccccggcgcagtgctttgagatgctggcactcattcgccagaagcacccgaccattcccatcggccttttgatgtatgccaacctggtgtttaacaaaggcattgatgagttttatgccgagtgcgagaaagtcggcgtcgattcggtgctggttgccgatgtgcccgtggaagagtccgcgcccttccgccaggccgcgttgcgtcataatgtcgcacctatctttatttgcccgccgaatgccgacgatgatttgctgcgccagatagcctcttacggtcgtggttacacctatttgctgtcgcgagcgggcgtgaccggcgcagaaaaccgcgccgcgttacccctcaatcatctggttgcgaagctgaaagagtacaacgctgcgcctccattgcagggatttggtatttccgccccggatcaggtaaaagccgcgattgatgcaggagctgcgggcgcgatttctggttcggccatcgttaaaatcatcgagcaacatattaatgagccagagaaaatgctggcggcactgaaagcttttgtacaaccgatgaaagcggcgacgcgcagtta

SEQ ID NO: 873 - DNA, 28 bp, Artificial Sequence
  source: /note="Description of Artificial Sequence: Synthetic oligonucleotide"
  source: /note="BBa_J61132"
tctagagaaagacaggattaactagatg

SEQ ID NO: 874 - DNA, 28 bp, Artificial Sequence
  source: /note="Description of Artificial Sequence: Synthetic oligonucleotide"
  source: /note="BBa_J61136"
tctagagaaagagctgagcaactagatg

SEQ ID NO: 875 - DNA, 28 bp, Artificial Sequence
  source: /note="Description of Artificial Sequence: Synthetic oligonucleotide"
  source: /note="BBa_J61137"
tctagagaaagagtagatcaactagatg

SEQ ID NO: 876 - DNA, 28 bp, Artificial Sequence
  source: /note="Description of Artificial Sequence: Synthetic oligonucleotide"
  source: /note="BBa_J61138"
tctagagaaagatatgaataactagatg

SEQ ID NO: 877 - DNA, 28 bp, Artificial Sequence
  source: /note="Description of Artificial Sequence: Synthetic oligonucleotide"
  source: /note="BBa_J61139"
tctagagaaagattagagtcactagatg

SEQ ID NO: 878 - DNA, 6574 bp, Artificial Sequence
  source: /note="Description of Artificial Sequence: Synthetic polynucleotide"
  source: /note="fbrS40FTrpE-DCBA"
ctctagaaataattttgtttaactttaagaaggagatatacatatgcaaacacaaaaaccgactctcgaactgctaacctgcgaaggcgcttatcgcgacaacccgactgcgctttttcaccagttgtgtggggatcgtccggcaacgctgctgctggaattcgcagatatcgacagcaaagatgatttaaaaagcctgctgctggtagacagtgcgctgcgcattacagcattaagtgacactgtcacaatccaggcgctttccggcaatggagaagccctgttgacactactggataacgccttgcctgcgggtgtggaaaatgaacaatcaccaaactgccgcgtactgcgcttcccgcctgtcagtccactgctggatgaagacgcccgcttatgctccctttcggtttttgacgctttccgcttattacagaatctgttgaatgtaccgaaggaagaacgagaagcaatgttcttcggcggcctgttctcttatgaccttgtggcgggatttgaaaatttaccgcaactgtcagcggaaaatagctgccctgatttctgtttttatctcgctgaaacgctgatggtgattgaccatcagaaaaaaagcactcgtattcaggccagcctgtttgctccgaatgaagaagaaaaacaacgtctcactgctcgcctgaacgaactacgtcagcaactgaccgaagccgcgccgccgctgccggtggtttccgtgccgcatatgcgttgtgaatgtaaccagagcgatgaagagttcggtggtgtagtgcgtttgttgcaaaaagcgattcgcgccggagaaattttccaggtggtgccatctcgccgtttctctctgccctgcccgtcaccgctggcagcctattacgtgctgaaaaagagtaatcccagcccgtacatgttttttatgcaggataatgatttcaccctgtttggcgcgtcgccggaaagttcgctcaagtatgacgccaccagccgccagattgagatttacccgattgccggaacacgtccacgcggtcgtcgtgccgatggttcgctggacagagacctcgacagccgcatcgaactggagatgcgtaccgatcataaagagctttctgaacatctgatgctggtggatctcgcccgtaatgacctggcacgcatttgcacacccggcagccgctacgtcgccgatctcaccaaagttgaccgttactcttacgtgatgcacctagtctcccgcgttgttggtgagctgcgccacgatctcgacgccctgcacgcttaccgcgcctgtatgaatatggggacgttaagcggtgcaccgaaagtacgcgctatgcagttaattgccgaagcagaaggtcgtcgacgcggcagctacggcggcgcggtaggttattttaccgcgcatggcgatctcgacacctgcattgtgatccgctcggcgctggtggaaaacggtatcgccaccgtgcaagccggtgctggcgtagtccttgattctgttccgcagtcggaagccgacgaaactcgtaataaagcccgcgctgtactgcgcgctattgccaccgcgcatcatgcacaggagacgttctaatggctgacattctgctgctcgataatatcgactcttttacgtacaacctggcagatcagttgcgcagcaatggtcataacgtggtgatttaccgcaaccatattccggcgcagaccttaattgaacgcctggcgacgatgagcaatccggtgctgatgctttctcctggccccggtgtgccgagcgaagccggttgtatgccggaactcctcacccgcttgcgtggcaagctgccaattattggcatttgcctcggacatcaggcgattgtcgaagcttacgggggctatgtcggtcaggcgggcgaaattcttcacggtaaagcgtcgagcattgaacatgacggtcaggcgatgtttgccggattaacaaacccgctgccagtggcgcgttatcactcgctggttggcagtaacattccggccggtttaaccatcaacgcccattttaatggcatggtgatggcggtgcgtcacgatgcagatcgcgtttgtggattccagttccatccggaatccattcttactacccagggcgctcgcctgctggaacaaacgctggcctgggcgcagcagaaactagagccaaccaacacgctgcaaccgattctggaaaaactgtatcaggcacagacgcttagccaacaagaaagccaccagctgttttcagcggtggtacgtggcgagctgaagccggaacaactggcggcggcgctggtgagcatgaaaattcgcggtgaacacccgaacgagatcgccggggcagcaaccgcgctactggaaaacgccgcgccattcccgcgcccggattatctgtttgccgatatcgtcggtactggcggtgacggcagcaacagcatcaatatttctaccgccagtgcgtttgtcgccgcggcctgcgggctgaaagtggcgaaacacggcaaccgtagcgtctccagtaaatccggctcgtcggatctgctggcggcgttcggtattaatcttgatatgaacgccgataaatcgcgccaggcgctggatgagttaggcgtctgtttcctctttgcgccgaagtatcacaccggattccgccatgcgatgccggttcgccagcaactgaaaacccgcactctgttcaacgtgctgggaccattgattaacccggcgcatccgccgctggcgctaattggtgtttatagtccggaactggtgctgccgattgccgaaaccttgcgcgtgctggggtatcaacgcgcggcagtggtgcacagcggcgggatggatgaagtttcattacacgcgccgacaatcgttgccgaactacatgacggcgaaattaagagctatcaattgaccgctgaagattttggcctgacaccctaccaccaggagcaattggcaggcggaacaccggaagaaaaccgtgacattttaacacgcttgttacaaggtaaaggcgacgccgcccatgaagcagccgtcgcggcgaatgtcgccatgttaatgcgcctgcatggccatgaagatctgcaagccaatgcgcaaaccgttcttgaggtactgcgcagtggttccgcttacgacagagtcaccgcactggcggcacgagggtaaatgatgcaaaccgttttagcgaaaatcgtcgcagacaaggcgatttgggtagaaacccgcaaagagcagcaaccgctggccagttttcagaatgaggttcagccgagcacgcgacatttttatgatgcacttcagggcgcacgcacggcgtttattctggagtgtaaaaaagcgtcgccgtcaaaaggcgtgatccgtgatgatttcgatccggcacgcattgccgccatttataaacattacgcttcggcaatttcagtgctgactgatgagaaatattttcaggggagctttgatttcctccccatcgtcagccaaatcgccccgcagccgattttatgtaaagacttcattatcgatccttaccagatctatctggcgcgctattaccaggccgatgcctgcttattaatgctttcagtactggatgacgaacaatatcgccagcttgcagccgtcgcccacagtctggagatgggtgtgctgaccgaagtcagtaatgaagaggaactggagcgcgccattgcattgggggcaaaggtcgttggcatcaacaaccgcgatctgcgcgatttgtcgattgatctcaaccgtacccgcgagcttgcgccgaaactggggcacaacgtgacggtaatcagcgaatccggcatcaatacttacgctcaggtgcgcgagttaagccacttcgctaacggctttctgattggttcggcgttgatggcccatgacgatttgaacgccgccgtgcgtcgggtgttgctgggtgagaataaagtatgtggcctgacacgtgggcaagatgctaaagcagcttatgacgcgggcgcgatttacggtgggttgatttttgttgcgacatcaccgcgttgcgtcaacgttgaacaggcgcaggaagtgatggctgcagcaccgttgcagtatgttggcgtgttccgcaatcacgatattgccgatgtggcggacaaagctaaggtgttatcgctggcggcagtgcaactgcatggtaatgaagatcagctgtatatcgacaatctgcgtgaggctctgccagcacacgtcgccatctggaaggctttaagtgtcggtgaaactcttcccgcgcgcgattttcagcacatcgataaatatgtattcgacaacggtcagggcgggagcggacaacgtttcgactggtcactattaaatggtcaatcgcttggcaacgttctgctggcggggggcttaggcgcagataactgcgtggaagcggcacaaaccggctgcgccgggcttgattttaattctgctgtagagtcgcaaccgggtatcaaagacgcacgtcttttggcctcggttttccagacgctgcgcgcatattaaggaaaggaacaatgacaacattacttaacccctattttggtgagtttggcggcatgtacgtgccacaaatcctgatgcctgctctgcgccagctggaagaagcttttgtcagcgcgcaaaaagatcctgaatttcaggctcagttcaacgacctgctgaaaaactatgccgggcgtccaaccgcgctgaccaaatgccagaacattacagccgggacgaacaccacgctgtatctgaagcgcgaagatttgctgcacggcggcgcgcataaaactaaccaggtgctcggtcaggctttactggcgaagcggatgggtaaaactgaaattattgccgaaaccggtgccggtcagcatggcgtggcgtcggcccttgccagcgccctgctcggcctgaaatgccgaatttatatgggtgccaaagacgttgaacgccagtcgcccaacgttttccggatgcgcttaatgggtgcggaagtgatcccggtacatagcggttccgcgaccctgaaagatgcctgtaatgaggcgctacgcgactggtccggcagttatgaaaccgcgcactatatgctgggtaccgcagctggcccgcatccttacccgaccattgtgcgtgagtttcagcggatgattggcgaagaaacgaaagcgcagattctggaaagagaaggtcgcctgccggatgccgttatcgcctgtgttggcggtggttcgaatgccatcggtatgtttgcagatttcatcaacgaaaccgacgtcggcctgattggtgtggagcctggcggccacggtatcgaaactggcgagcacggcgcaccgttaaaacatggtcgcgtgggcatctatttcggtatgaaagcgccgatgatgcaaaccgaagacgggcaaattgaagagtcttactccatttctgccgggctggatttcccgtccgtcggcccgcaacatgcgtatctcaacagcactggacgcgctgattacgtgtctattaccgacgatgaagccctggaagcctttaaaacgctttgcctgcatgaagggatcatcccggcgctggaatcctcccacgccctggcccatgcgctgaaaatgatgcgcgaaaatccggaaaaagagcagctactggtggttaacctttccggtcgcggcgataaagacatcttcaccgttcacgatattttgaaagcacgaggggaaatctgatggaacgctacgaatctctgtttgcccagttgaaggagcgcaaagaaggcgcattcgttcctttcgtcaccctcggtgatccgggcattgagcagtcgttgaaaattatcgatacgctaattgaagccggtgctgacgcgctggagttaggcatccccttctccgacccactggcggatggcccgacgattcaaaacgccacactgcgtgcttttgcggcgggagtaaccccggcgcagtgctttgagatgctggcactcattcgccagaagcacccgaccattcccatcggccttttgatgtatgccaacctggtgtttaacaaaggcattgatgagttttatgccgagtgcgagaaagtcggcgtcgattcggtgctggttgccgatgtgcccgtggaagagtccgcgcccttccgccaggccgcgttgcgtcataatgtcgcacctatctttatttgcccgccgaatgccgacgatgatttgctgcgccagatagcctcttacggtcgtggttacacctatttgctgtcgcgagcgggcgtgaccggcgcagaaaaccgcgccgcgttacccctcaatcatctggttgcgaagctgaaagagtacaacgctgcgcctccattgcagggatttggtatttccgccccggatcaggtaaaagccgcgattgatgcaggagctgcgggcgcgatttctggttcggccatcgttaaaatcatcgagcaacatattaatgagccagagaaaatgctggcggcactgaaagcttttgtacaaccgatgaaagcggcgacgcgcagttaa

SEQ ID NO: 879 - DNA, 1562 bp, Artificial Sequence
  source: /note="Description of Artificial Sequence: Synthetic polynucleotide"
  source: /note="fbrTrpE"
atgcaaacacaaaaaccgactctcgaactgctaacctgcgaaggcgcttatcgcgacaacccgactgcgctttttcaccagttgtgtggggatcgtccggcaacgctgctgctggaattcgcagatatcgacagcaaagatgatttaaaaagcctgctgctggtagacagtgcgctgcgcattacagcattaagtgacactgtcacaatccaggcgctttccggcaatggagaagccctgttgacactactggataacgccttgcctgcgggtgtggaaaatgaacaatcaccaaactgccgcgtactgcgcttcccgcctgtcagtccactgctggatgaagacgcccgcttatgctccctttcggtttttgacgctttccgcttattacagaatctgttgaatgtaccgaaggaagaacgagaagcaatgttcttcggcggcctgttctcttatgaccttgtggcgggatttgaaaatttaccgcaactgtcagcggaaaatagctgccctgatttctgtttttatctcgctgaaacgctgatggtgattgaccatcagaaaaaaagcactcgtattcaggccagcctgtttgctccgaatgaagaagaaaaacaacgtctcactgctcgcctgaacgaactacgtcagcaactgaccgaagccgcgccgccgctgccggtggtttccgtgccgcatatgcgttgtgaatgtaaccagagcgatgaagagttcggtggtgtagtgcgtttgttgcaaaaagcgattcgcgccggagaaattttccaggtggtgccatctcgccgtttctctctgccctgcccgtcaccgctggcagcctattacgtgctgaaaaagagtaatcccagcccgtacatgttttttatgcaggataatgatttcaccctgtttggcgcgtcgccggaaagttcgctcaagtatgacgccaccagccgccagattgagatttacccgattgccggaacacgtccacgcggtcgtcgtgccgatggttcgctggacagagacctcgacagccgcatcgaactggagatgcgtaccgatcataaagagctttctgaacatctgatgctggtggatctcgcccgtaatgacctggcacgcatttgcacacccggcagccgctacgtcgccgatctcaccaaagttgaccgttactcttacgtgatgcacctagtctcccgcgttgttggtgagctgcgccacgatctcgacgccctgcacgcttaccgcgcctgtatgaatatggggacgttaagcggtgcaccgaaagtacgcgctatgcagttaattgccgaagcagaaggtcgtcgacgcggcagctacggcggcgcggtaggttattttaccgcgcatggcgatctcgacacctgcattgtgatccgctcggcgctggtggaaaacggtatcgccaccgtgcaagccggtgctggcgtagtccttgattctgttccgcagtcggaagccgacgaaactcgtaataaagcccgcgctgtactgcgcgctattgccaccgcgcatcatgcacaggagacgttcta

SEQ ID NO: 880 - DNA, 31 bp, Artificial Sequence
  source: /note="Description of Artificial Sequence: Synthetic oligonucleotide"
  source: /note="BBa_B0029"
tctagagttcacacaggaaacctactagatg

SEQ ID NO: 881 - DNA, 31 bp, Artificial Sequence
  source: /note="Description of Artificial Sequence: Synthetic oligonucleotide"
  source: /note="BBa_B0030"
tctagagattaaagaggagaaatactagatg

SEQ ID NO: 882 - DNA, 30 bp, Artificial Sequence
  source: /note="Description of Artificial Sequence: Synthetic oligonucleotide"
  source: /note="BBa_B0031"
tctagagtcacacaggaaacctactagatg

SEQ ID NO: 883 - DNA, 29 bp, Artificial Sequence
  source: /note="Description of Artificial Sequence: Synthetic oligonucleotide"
  source: /note="BBa_B0032"
tctagagtcacacaggaaagtactagatg

SEQ ID NO: 884 - DNA, 27 bp, Artificial Sequence
  source: /note="Description of Artificial Sequence: Synthetic oligonucleotide"
  source: /note="BBa_B0033"
tctagagtcacacaggactactagatg

SEQ ID NO: 885 - DNA, 28 bp, Artificial Sequence
  source: /note="Description of Artificial Sequence: Synthetic oligonucleotide"
  source: /note="BBa_B0034"
tctagagaaagaggagaaatactagatg

SEQ ID NO: 886 - DNA, 30 bp, Artificial Sequence
  source: /note="Description of Artificial Sequence: Synthetic oligonucleotide"
  source: /note="BBa_B0035"
tctagagattaaagaggagaatactagatg

SEQ ID NO: 887 - DNA, 28 bp, Artificial Sequence
  source: /note="Description of Artificial Sequence: Synthetic oligonucleotide"
  source: /note="BBa_B0064"
tctagagaaagaggggaaatactagatg

SEQ ID NO: 888 - DNA, 64 bp, Artificial Sequence; identical to SEQ ID NO: 744
  source: /note="Description of Artificial Sequence: Synthetic oligonucleotide"
  source: /note="SYN23119 promoter"

SEQ ID NO: 889 - DNA, 94 bp, Artificial Sequence
  source: /note="Description of Artificial Sequence: Synthetic oligonucleotide"
  source: /note="SYN23119 promoter with RBS"
ggaaaatttttttaaaaaaaaaacttgacagctagctcagtccttggtataatgctagcacgaagtgaattatataaaagtgggaggtgcccga

SEQ ID NO: 890 - DNA, 1225 bp, Artificial Sequence
  source: /note="Description of Artificial Sequence: Synthetic polynucleotide"
  source: /note="Pseudomonas fluorescens, codon optimized for expression in E. coli, driven by the SYN23119 Construct can be expressed from a plasmid, e.g., p15 or can be integrated into the chromosome, e.g., at the HA3/4 site"
ggaaaatttttttaaaaaaaaaacttgacagctagctcagtccttggtataatgctagcacgaagtgaattatataaaagtgggaggtgcccgaatgacgacccgaaatgattgcctagcgttggatgcacaggacagtctggctccgctgcgccaacaatttgcgctgccggagggtgtgatatacctggatggcaattcgctgggcgcacgtccggtagctgcgctggctcgcgcgcaggctgtgatcgcagaagaatggggcaacgggttgatccgttcatggaactctgcgggctggcgtgatctgtctgaacgcctgggtaatcgcctggctaccctgattggtgcgcgcgatggggaagtagttgttactgataccacctcgattaatctgtttaaagtgctgtcagcggcgctgcgcgtgcaagctacccgtagcccggagcgccgtgttatcgtgactgagacctcgaatttcccgaccgacctgtatattgcggaagggttggcggatatgctgcaacaaggttacactctgcgtttggtggattcaccggaagagctgccacaggctatagatcaggacaccgcggtggtgatgctgacgcacgtaaattataaaaccggttatatgcacgacatgcaggctctgaccgcgttgagccacgagtgtggggctctggcgatttgggatctggcgcactctgctggcgctgtgccggtggacctgcaccaagcgggcgcggactatgcgattggctgcacgtacaaatacctgaatggcggcccgggttcgcaagcgtttgtttgggtttcgccgcaactgtgcgacctggtaccgcagccgctgtctggttggttcggccatagtcgccaattcgcgatggagccgcgctacgaaccttctaacggcattgctcgctatctgtgcggcactcagcctattactagcttggctatggtggagtgcggcctggatgtgtttgcgcagacggatatggcttcgctgcgccgtaaaagtctggcgctgactgatctgttcatcgagctggttgaacaacgctgcgctgcacacgaactgaccctggttactccacgtgaacacgcgaaacgcggctctcacgtgtcttttgaacaccccgagggttacgctgttattcaagctctgattgatcgtggcgtgatcggcgattaccgtgagccacgtattatgcgtttcggt

SEQ ID NO: 891 - DNA, 66 bp, Artificial Sequence; identical to SEQ ID NO: 740
  source: /note="Description of Artificial Sequence: Synthetic oligonucleotide"
  source: /note="Lpp promoter from E. coli SEQ ID NO: 891"

SEQ ID NO: 892 - DNA, 96 bp, Artificial Sequence
  source: /note="Description of Artificial Sequence: Synthetic oligonucleotide"
  source: /note="Lpp promoter from E. coli SEQ ID NO: 892"
ataagtgccttcccatcaaaaaaatattctcaacataaaaaactttgtgtaatacttgtaacgctagtgaattatataaaagtgggaggtgcccga

SEQ ID NO: 893 - DNA, 1347 bp, Artificial Sequence
  source: /note="Description of Artificial Sequence: Synthetic polynucleotide"
  source: /note="Pseudomonas fluorescens kynureninase driven by Lpp promoter from E. coli SEQ ID NO: 893 Construct can be expressed from a plasmid, e.g., p15 or can be integrated into the chromosome, e.g., at the HA3/4 site"
ataagtgccttcccatcaaaaaaatattctcaacataaaaaactttgtgtaatacttgtaacgctagtgaattatataaaagtgggaggtgcccgaatgacgacccgaaatgattgcctagcgttggatgcacaggacagtctggctccgctgcgccaacaatttgcgctgccggagggtgtgatatacctggatggcaattcgctgggcgcacgtccggtagctgcgctggctcgcgcgcaggctgtgatcgcagaagaatggggcaacgggttgatccgttcatggaactctgcgggctggcgtgatctgtctgaacgcctgggtaatcgcctggctaccctgattggtgcgcgcgatggggaagtagttgttactgataccacctcgattaatctgtttaaagtgctgtcagcggcgctgcgcgtgcaagctacccgtagcccggagcgccgtgttatcgtgactgagacctcgaatttcccgaccgacctgtatattgcggaagggttggcggatatgctgcaacaaggttacactctgcgtttggtggattcaccggaagagctgccacaggctatagatcaggacaccgcggtggtgatgctgacgcacgtaaattataaaaccggttatatgcacgacatgcaggctctgaccgcgttgagccacgagtgtggggctctggcgatttgggatctggcgcactctgctggcgctgtgccggtggacctgcaccaagcgggcgcggactatgcgattggctgcacgtacaaatacctgaatggcggcccgggttcgcaagcgtttgtttgggtttcgccgcaactgtgcgacctggtaccgcagccgctgtctggttggttcggccatagtcgccaattcgcgatggagccgcgctacgaaccttctaacggcattgctcgctatctgtgcggcactcagcctattactagcttggctatggtggagtgcggcctggatgtgtttgcgcagacggatatggcttcgctgcgccgtaaaagtctggcgctgactgatctgttcatcgagctggttgaacaacgctgcgctgcacacgaactgaccctggttactccacgtgaacacgcgaaacgcggctctcacgtgtcttttgaacaccccgagggttacgctgttattcaagctctgattgatcgtggcgtgatcggcgattaccgtgagccacgtattatgcgtttcggtttcactcctctgtatactacttttacggaagtttgggatgcagtacaaatcctgggcgaaatcctggatcgtaagacttgggcgcaggctcagtttcaggtgcgccactctgttacttaa

SEQ ID NO: 894 - DNA, 138 bp, Artificial Sequence
  source: /note="Description of Artificial Sequence: Synthetic polynucleotide"
  source: /note="fliC-FliC20"
tgacggcgattgagccgacgggtggaaacccaaaacgtaatcaacgtgggtactccttaaattgggttcgaatggaccatggcacaagtcattaataccaacagcctctcgctgatcactcaaaataatatcaacaag

SEQ ID NO: 895 - DNA, 70 bp, Artificial Sequence
  source: /note="Description of Artificial Sequence: Synthetic oligonucleotide"
  source: /note="fliC-RBS"
tgacggcgattgagccgacgggtggaaacccaaaacgtaatcaactacgaacacttacaggaggtaccca

SEQ ID NO: 896 - DNA, 70 bp, Artificial Sequence
  source: /note="Description of Artificial Sequence: Synthetic oligonucleotide"
  source: /note="fliC-RBS"
tgacggcgattgagccgacgggtggaaacccaaaacgtaatcaacaagtataaactctgggaggttccta

SEQ ID NO: 897 - DNA, 70 bp, Artificial Sequence
  source: /note="Description of Artificial Sequence: Synthetic oligonucleotide"
  source: /note="fliC-RBS"
tgacggcgattgagccgacgggtggaaacccaaaacgtaatcaactcaaatcccttaataaggaggtaaa

SEQ ID NO: 898 - DNA, 106 bp, Artificial Sequence
  source: /note="Description of Artificial Sequence: Synthetic polynucleotide"
  source: /note="RBS-phoA"
ctctagaaataattttgtttaactttaagaaggagatatacatatgaaacaaagcactattgcactggcactcttaccgttactgtttacccctgtgacaaaagcg

SEQ ID NO: 899 - DNA, 63 bp, Artificial Sequence
  source: /note="Description of Artificial Sequence: Synthetic oligonucleotide"
  source: /note="phoA"
atgaaacaaagcactattgcactggcactcttaccgttactgtttacccctgtgacaaaagcg

SEQ ID NO: 900 - DNA, 109 bp, Artificial Sequence
  source: /note="Description of Artificial Sequence: Synthetic polynucleotide"
  source: /note="RBS-ompF"
ctctagaaataattttgtttaactttaagaaggagatatacatatgatgaagcgcaatattctggcagtgatcgtccctgctctgttagtagcaggtactgcaaacgct

SEQ ID NO: 901 - DNA, 66 bp, Artificial Sequence
  source: /note="Description of Artificial Sequence: Synthetic oligonucleotide"
  source: /note="ompF"
atgatgaagcgcaatattctggcagtgatcgtccctgctctgttagtagcaggtactgcaaacgct

SEQ ID NO: 902 - DNA, 88 bp, Artificial Sequence
  source: /note="Description of Artificial Sequence: Synthetic oligonucleotide"
  source: /note="RBS-cvaC"
ctctagaaataattttgtttaactttaagaaggagatatacatatgagaactctgactctaaatgaattagattctgtttctggtggt

SEQ ID NO: 903 - DNA, 45 bp, Artificial Sequence
  source: /note="Description of Artificial Sequence: Synthetic oligonucleotide"
  source: /note="cvaC"
atgagaactctgactctaaatgaattagattctgtttctggtggt

SEQ ID NO: 904 - DNA, 88 bp, Artificial Sequence
  source: /note="Description of Artificial Sequence: Synthetic oligonucleotide"
  source: /note="RBS-phoA (Optimized)"
gacgccagagagttaagggggttaaatgaaacaatcgaccatcgcattggcgctgcttcctctattgttcacaccggtgacaaaggca

SEQ ID NO: 905 - DNA, 63 bp, Artificial Sequence
  source: /note="Description of Artificial Sequence: Synthetic oligonucleotide"
  source: /note="Optimized phoA"
atgaaacaatcgaccatcgcattggcgctgcttcctctattgttcacaccggtgacaaaggca

SEQ ID NO: 906 - DNA, 160 bp, Artificial Sequence
  source: /note="Description of Artificial Sequence: Synthetic polynucleotide"
  source: /note="RBS-TorA"
ctctagaaataattttgtttaactttaagaaggagatatacatatgaacaataacgatctctttcaggcatcacgtcggcgttttctggcacaactcggcggcttaaccgtcgccgggatgctggggccgtcattgttaacgccgcgacgtgcgactgcg

SEQ ID NO: 907 - DNA, 117 bp, Artificial Sequence
  source: /note="Description of Artificial Sequence: Synthetic polynucleotide"
  source: /note="TorA"
atgaacaataacgatctctttcaggcatcacgtcggcgttttctggcacaactcggcggcttaaccgtcgccgggatgctggggccgtcattgttaacgccgcgacgtgcgactgcg

SEQ ID NO: 908 - DNA, 148 bp, Artificial Sequence
  source: /note="Description of Artificial Sequence: Synthetic polynucleotide"
  source: /note="RBS-TorA alternate"
cccacattcgaggtactaaatgaacaataacgatctctttcaggcatcacgtcggcgttttctggcacaactcggcggcttaaccgtcgccgggatgctggggacgtcattgttaacgccgcgccgtgcgactgcggcgcaagcggcg

SEQ ID NO: 909 - DNA, 129 bp, Artificial Sequence
  source: /note="Description of Artificial Sequence: Synthetic polynucleotide"
  source: /note="TorA (alternate)"
atgaacaataacgatctctttcaggcatcacgtcggcgttttctggcacaactcggcggcttaaccgtcgccgggatgctggggacgtcattgttaacgccgcgccgtgcgactgcggcgcaagcggcg

SEQ ID NO: 910 - DNA, 130 bp, Artificial Sequence
  source: /note="Description of Artificial Sequence: Synthetic polynucleotide"
  source: /note="RBS-fdnG"
accctattacacacctaaggaggccaaatacatggacgtcagtcgcagacaattttttaaaatctgcgcgggcggtatggcgggaacaacagtagcagcattgggctttgccccgaagcaagcactggct

SEQ ID NO: 911 - DNA, 99 bp, Artificial Sequence
  source: /note="Description of Artificial Sequence: Synthetic oligonucleotide"
  source: /note="fdnG"
atggacgtcagtcgcagacaattttttaaaatctgcgcgggcggtatggcgggaacaacagtagcagcattgggctttgccccgaagcaagcactggct

SEQ ID NO: 912 - DNA, 168 bp, Artificial Sequence
  source: /note="Description of Artificial Sequence: Synthetic polynucleotide"
  source: /note="RBS-dmsA"
tacgcaaaaaacataatttaagagaggataaacatgaaaacgaaaatccctgatgcggtattggctgctgaggtgagtcgccgtggtttggtaaaaacgacagcgatcggcggcctggcaatggccagcagcgcattaacattaccttttagtcggattgcgcacgct

SEQ ID NO: 913 - DNA, 135 bp, Artificial Sequence
  source: /note="Description of Artificial Sequence: Synthetic polynucleotide"
  source: /note="dmsA"
atgaaaacgaaaatccctgatgcggtattggctgctgaggtgagtcgccgtggtttggtaaaaacgacagcgatcggcggcctggcaatggccagcagcgcattaacattaccttttagtcggattgcgcacgct

SEQ ID NO: 914 - DNA, 712 bp, Artificial Sequence
  source: /note="Description of Artificial Sequence: Synthetic polynucleotide"
  source: /note="TetR/TetA Promoter"
gaattcgttaagacccactttcacatttaagttgtttttctaatccgcatatgatcaattcaaggccgaataagaaggctggctctgcaccttggtgatcaaataattcgatagcttgtcgtaataatggcggcatactatcagtagtaggtgtttccctttcttctttagcgacttgatgctcttgatcttccaatacgcaacctaaagtaaaatgccccacagcgctgagtgcatataatgcattctctagtgaaaaaccttgttggcataaaaaggctaattgattttcgagagtttcatactgtttttctgtaggccgtgtacctaaatgtacttttgctccatcgcgatgacttagtaaagcacatctaaaacttttagcgttattacgtaaaaaatcttgccagctttccccttctaaagggcaaaagtgagtatggtgcctatctaacatctcaatggctaaggcgtcgagcaaagcccgcttattttttacatgccaatacaatgtaggctgctctacacctagcttctgggcgagtttacgggttgttaaaccttcgattccgacctcattaagcagctctaatgcgctgttaatcactttacttttatctaatctagacatcattaattcctaatttttgttgacactctatcattgatagagttattttaccactccctatcagtgatagagaaaagtgaa

SEQ ID NO: 915 - DNA, 104 bp, Artificial Sequence; identical to SEQ ID NO: 801
  source: /note="Description of Artificial Sequence: Synthetic polynucleotide"
  source: /note="fliC Promoter"

SEQ ID NO: 916 - DNA, 162 bp, Artificial Sequence
  source: /note="Description of Artificial Sequence: Synthetic polynucleotide"
  source: /note="FnrS Promoter"
ggtaccagttgttcttattggtggtgttgctttatggttgcatcgtagtaaatggttgtaacaaaagcaatttttccggctgtctgtatacaaaaacgccgcaaagtttgagcgaagtcaataaactctctacccattcagggcaatatctctcttggatcc

SEQ ID NO: 917 - DNA, 358 bp, Artificial Sequence
  source: /note="Description of Artificial Sequence: Synthetic polynucleotide"
  source: /note="DOM Construct Terminator"
cacatttccccgaaaagtgccgatggccccccgatggtagtgtggcccatgcgagagtagggaactgccaggcatcaaataaaacgaaaggctcagtcgaaagactgggcctttcgttttatctgttgtttgtcggtgaacgctctcctgagtaggacaaatccgccgggagcggatttgaacgttgcgaagcaacggcccggagggtggcgggcaggacgcccgccataaactgccaggcatcaaattaagcagaaggccatcctgacggatggcctttttgcgtggccagtgccaagcttgcatgcagattgcagcattacacgtcttgagcgattgtgtaggctggagctgcttc

SEQ ID NO: 918 - DNA, 48 bp, Artificial Sequence
  source: /note="Description of Artificial Sequence: Synthetic oligonucleotide"
  source: /note="FRT Site"
gaagttcctatactttctagagaataggaacttcggaataggaacttc

SEQ ID NO: 919 - DNA, 1345 bp, Artificial Sequence
  source: /note="Description of Artificial Sequence: Synthetic polynucleotide"
  source: /note="Kanamycin Resistance Cassette (for integration in between FRT sites)"
aagatcccctcacgctgccgcaagcactcagggcgcaagggctgctaaaggaagcggaacacgtagaaagccagtccgcagaaacggtgctgaccccggatgaatgtcagctactgggctatctggacaagggaaaacgcaagcgcaaagagaaagcaggtagcttgcagtgggcttacatggcgatagctagactgggcggttttatggacagcaagcgaaccggaattgccagctggggcgccctctggtaaggttgggaagccctgcaaagtaaactggatggctttcttgccgccaaggatctgatggcgcaggggatcaagatctgatcaagagacaggatgaggatcgtttcgcatgattgaacaagatggattgcacgcaggttctccggccgcttgggtggagaggctattcggctatgactgggcacaacagacaatcggctgctctgatgccgccgtgttccggctgtcagcgcaggggcgcccggttctttttgtcaagaccgacctgtccggtgccctgaatgaactgcaggacgaggcagcgcggctatcgtggctggccacgacgggcgttccttgcgcagctgtgctcgacgttgtcactgaagcgggaagggactggctgctattgggcgaagtgccggggcaggatctcctgtcatctcaccttgctcctgccgagaaagtatccatcatggctgatgcaatgcggcggctgcatacgcttgatccggctacctgcccattcgaccaccaagcgaaacatcgcatcgagcgagcacgtactcggatggaagccggtcttgtcgatcaggatgatctggacgaagagcatcaggggctcgcgccagccgaactgttcgccaggctcaaggcgcgcatgcccgacggcgaggatctcgtcgtgacccatggcgatgcctgcttgccgaatatcatggtggaaaatggccgcttttctggattcatcgactgtggccggctgggtgtggcggaccgctatcaggacatagcgttggctacccgtgatattgctgaagagcttggcggcgaatgggctgaccgcttcctcgtgctttacggtatcgccgctcccgattcgcagcgcatcgccttctatcgccttcttgacgagttcttctgagcgggactctggggttcgaaatgaccgaccaagcgacgcccaacctgccatcacgagatttcgattccaccgccgccttctatgaaaggttgggcttcggaatcgttttccgggacgccggctggatgatcctccagcgcggggatctcatgctggagttcttcgcccaccccagcttcaaaagcgctct

SEQ ID NO: 920 - protein, 219 aa, Artificial Sequence
  source: /note="Description of Artificial Sequence: Synthetic polypeptide"
  source: /note="human IL-12a construct with a N terminal OmpF secretion tag (sec-dependent secretion system)"
MMKRNILAVIVPALLVAGTANARNLPVATPDPGMFPCLHHSQNLLRAVSNMLQKARQTLEFYPCTSEEIDHEDITKDKTSTVEACLPLELTKNESCLNSRETSFITNGSCLASRKTSFMMALCLSSIYEDLKMYQVEFKTMNAKLLMDPKRQIFLDQNMLAVIDELMQALNFNSETVPQKSSLEEPDFYKTKIKLCILLHAFRIRAVTIDRVMSYLNAS

SEQ ID NO: 921 - protein, 218 aa, Artificial Sequence
  source: /note="Description of Artificial Sequence: Synthetic polypeptide"
  source: /note="human IL-12a construct with a N terminal PhoA secretion"
MKQSTIALALLPLLFTPVTKARNLPVATPDPGMFPCLHHSQNLLRAVSNMLQKARQTLEFYPCTSEEIDHEDITKDKTSTVEACLPLELTKNESCLNSRETSFITNGSCLASRKTSFMMALCLSSIYEDLKMYQVEFKTMNAKLLMDPKRQIFLDQNMLAVIDELMQALNFNSETVPQKSSLEEPDFYKTKIKLCILLHAFRIRAVTIDRVMSYLNAS

SEQ ID NO: 922 - protein, 236 aa, Artificial Sequence
  source: /note="Description of Artificial Sequence: Synthetic polypeptide"
  source: /note="human IL-12a construct with a N terminal TorA secretion tag (sec-dependent secretion system)"
MNNNDLFQASRRRFLAQLGGLTVAGMLGPSLLTPRRATARNLPVATPDPGMFPCLHHSQNLLRAVSNMLQKARQTLEFYPCTSEEIDHEDITKDKTSTVEACLPLELTKNESCLNSRETSFITNGSCLASRKTSFMMALCLSSIYEDLKMYQVEFKTMNAKLLMDPKRQIFLDQNMLAVIDELMQALNFNSETVPQKSSLEEPDFYKTKIKLCILLHAFRIRAVTIDRVMSYLNAS

SEQ ID NO: 923 - protein, 328 aa, Artificial Sequence
  source: /note="Description of Artificial Sequence: Synthetic polypeptide"
  source: /note="human IL-12b construct with a N terminal OmpF secretion tag (sec-dependent secretion system)"
MMKRNILAVIVPALLVAGTANAIWELKKDVYVVELDWYPDAPGEMVVLTCDTPEEDGITWTLDQSSEVLGSGKTLTIQVKEFGDAGQYTCHKGGEVLSHSLLLLHKKEDGIWSTDILKDQKEPKNKTFLRCEAKNYSGRFTCWWLTTISTDLTFSVKSSRGSSDPQGVTCGAATLSAERVRGDNKEYEYSVECQEDSACPAAEESLPIEVMVDAVHKLKYENYTSSFFIRDIIKPDPPKNLQLKPLKNSRQVEVSWEYPDTWSTPHSYFSLTFCVQVQGKSKREKKDRVFTDKTSATVICRKNASISVRAQDRYYSSSWSEWASVPCS

SEQ ID NO: 924 - protein, 327 aa, Artificial Sequence
  source: /note="Description of Artificial Sequence: Synthetic polypeptide"
  source: /note="human IL-12b construct with a N terminal PhoA secretion tag"
MKQSTIALALLPLLFTPVTKAIWELKKDVYVVELDWYPDAPGEMVVLTCDTPEEDGITWTLDQSSEVLGSGKTLTIQVKEFGDAGQYTCHKGGEVLSHSLLLLHKKEDGIWSTDILKDQKEPKNKTFLRCEAKNYSGRFTCWWLTTISTDLTFSVKSSRGSSDPQGVTCGAATLSAERVRGDNKEYEYSVECQEDSACPAAEESLPIEVMVDAVHKLKYENYTSSFFIRDIIKPDPPKNLQLKPLKNSRQVEVSWEYPDTWSTPHSYFSLTFCVQVQGKSKREKKDRVFTDKTSATVICRKNASISVRAQDRYYSSSWSEWASVPCS

SEQ ID NO: 925 - protein, 345 aa, Artificial Sequence
  source: /note="Description of Artificial Sequence: Synthetic polypeptide"
  source: /note="human IL-12 construct with a N terminal TorA secretion tag (sec-dependent secretion system)"
MNNNDLFQASRRRFLAQLGGLTVAGMLGPSLLTPRRATAIWELKKDVYVVELDWYPDAPGEMVVLTCDTPEEDGITWTLDQSSEVLGSGKTLTIQVKEFGDAGQYTCHKGGEVLSHSLLLLHKKEDGIWSTDILKDQKEPKNKTFLRCEAKNYSGRFTCWWLTTISTDLTFSVKSSRGSSDPQGVTCGAATLSAERVRGDNKEYEYSVECQEDSACPAAEESLPIEVMVDAVHKLKYENYTSSFFIRDIIKPDPPKNLQLKPLKNSRQVEVSWEYPDTWSTPHSYFSLTFCVQVQGKSKREKKDRVFTDKTSATVICRKNASISVRAQDRYYSSSWSEWASVPCS

SEQ ID NO: 926 - protein, 219 aa, Artificial Sequence; identical to SEQ ID NO: 920
  source: /note="Description of Artificial Sequence: Synthetic polypeptide"
  source: /note="murine IL-12a construct with a N terminal OmpF secretion tag (sec-dependent secretion system)"

SEQ ID NO: 927 - protein, 218 aa, Artificial Sequence; identical to SEQ ID NO: 921
  source: /note="Description of Artificial Sequence: Synthetic polypeptide"
  source: /note="murine IL-12a construct with a N terminal PhoA secretion tag"

SEQ ID NO: 928 - protein, 236 aa, Artificial Sequence; identical to SEQ ID NO: 922
  source: /note="Description of Artificial Sequence: Synthetic polypeptide"
  source: /note="murine IL-12a construct with a N terminal TorA secretion tag (sec-dependent secretion system)"

SEQ ID NO: 929 - protein, 335 aa, Artificial Sequence
  source: /note="Description of Artificial Sequence: Synthetic polypeptide"
  source: /note="murine IL-12b construct with a N terminal OmpF secretion tag (sec-dependent secretion system)"
MMKRNILAVIVPALLVAGTANAMWELEKDVYVVEVDWTPDAPGETVNLTCDTPEEDDITWTSDQRHGVIGSGKTLTITVKEFLDAGQYTCHKGGETLSHSHLLLHKKENGIWSTEILKNFKNKTFLKCEAPNYSGRFTCSWLVQRNMDLKFNIKSSSSSPDSRAVTCGMASLSAEKVTLDQRDYEKYSVSCQEDVTCPTAEETLPIELALEARQQNKYENYSTSFFIRDIIKPDPPKNLQMKPLKNSQVEVSWEYPDSWSTPHSYFSLKFFVRIQRKKEKMKETEEGCNQKGAFLVEKTSTEVQCKGGNVCVQAQDRYYNSSCSKWACVPCRVRS

SEQ ID NO: 930 - protein, 334 aa, Artificial Sequence
  source: /note="Description of Artificial Sequence: Synthetic polypeptide"
  source: /note="murine IL-12b construct with a N terminal PhoA secretion tag"
MKQSTIALALLPLLFTPVTKAMWELEKDVYVVEVDWTPDAPGETVNLTCDTPEEDDITWTSDQRHGVIGSGKTLTITVKEFLDAGQYTCHKGGETLSHSHLLLHKKENGIWSTEILKNFKNKTFLKCEAPNYSGRFTCSWLVQRNMDLKFNIKSSSSSPDSRAVTCGMASLSAEKVTLDQRDYEKYSVSCQEDVTCPTAEETLPIELALEARQQNKYENYSTSFFIRDIIKPDPPKNLQMKPLKNSQVEVSWEYPDSWSTPHSYFSLKFFVRIQRKKEKMKETEEGCNQKGAFLVEKTSTEVQCKGGNVCVQAQDRYYNSSCSKWACVPCRVRS

SEQ ID NO: 931 - protein, 352 aa, Artificial Sequence
  source: /note="Description of Artificial Sequence: Synthetic polypeptide"
  source: /note="murine IL-12b construct with a N terminal TorA secretion tag (sec-dependent secretion system)"
MNNNDLFQASRRRFLAQLGGLTVAGMLGPSLLTPRRATAMWELEKDVYVVEVDWTPDAPGETVNLTCDTPEEDDITWTSDQRHGVIGSGKTLTITVKEFLDAGQYTCHKGGETLSHSHLLLHKKENGIWSTEILKNFKNKTFLKCEAPNYSGRFTCSWLVQRNMDLKFNIKSSSSSPDSRAVTCGMASLSAEKVTLDQRDYEKYSVSCQEDVTCPTAEETLPIELALEARQQNKYENYSTSFFIRDIIKPDPPKNLQMKPLKNSQVEVSWEYPDSWSTPHSYFSLKFFVRIQRKKEKMKETEEGCNQKGAFLVEKTSTEVQCKGGNVCVQAQDRYYNSSCSKWACVPCRVRS

SEQ ID NO: 932 - protein, 149 aa, Artificial Sequence
  source: /note="Description of Artificial Sequence: Synthetic polypeptide"
  source: /note="human GMCSF construct with a N terminal OmpF secretion tag (sec-dependent secretion system)"
MMKRNILAVIVPALLVAGTANAAPARSPSPSTQPWEHVNAIQEARRLLNLSRDTAAEMNETVEVISEMFDLQEPTCLQTRLELYKQGLRGSLTKLKGPLTMMASHYKQHCPPTPETSCATQIITFESFKENLKDFLLVIPFDCWEPVQE

SEQ ID NO: 933 - protein, 148 aa, Artificial Sequence
  source: /note="Description of Artificial Sequence: Synthetic polypeptide"
  source: /note="human GMCSF construct with a N terminal PhoA secretion tag"
MKQSTIALALLPLLFTPVTKAAPARSPSPSTQPWEHVNAIQEARRLLNLSRDTAAEMNETVEVISEMFDLQEPTCLQTRLELYKQGLRGSLTKLKGPLTMMASHYKQHCPPTPETSCATQIITFESFKENLKDFLLVIPFDCWEPVQE

SEQ ID NO: 934 - protein, 166 aa, Artificial Sequence
  source: /note="Description of Artificial Sequence: Synthetic polypeptide"
  source: /note="human GMCSF construct with a N terminal TorA secretion tag (sec-dependent secretion system)"
MNNNDLFQASRRRFLAQLGGLTVAGMLGPSLLTPRRATAAPARSPSPSTQPWEHVNAIQEARRLLNLSRDTAAEMNETVEVISEMFDLQEPTCLQTRLELYKQGLRGSLTKLKGPLTMMASHYKQHCPPTPETSCATQIITFESFKENLKDFLLVIPFDCWEPVQE

SEQ ID NO: 935 - protein, 136 aa, Artificial Sequence
  source: /note="Description of Artificial Sequence: Synthetic polypeptide"
  source: /note="human Il-15 construct with a N terminal OmpF secretion tag (sec-dependent secretion system)"
MMKRNILAVIVPALLVAGTANANWVNVISDLKKIEDLIQSMHIDATLYTESDVHPSCKVTAMKCFLLELQVISLESGDASIHDTVENLIILANNSLSSNGNVTESGCKECEELEEKNIKEFLQSFVHIVQMFINTS

SEQ ID NO: 936 - protein, 135 aa, Artificial Sequence
  source: /note="Description of Artificial Sequence: Synthetic polypeptide"
  source: /note="human Il-15 construct with a N terminal PhoA secretion tag"
MKQSTIALALLPLLFTPVTKANWVNVISDLKKIEDLIQSMHIDATLYTESDVHPSCKVTAMKCFLLELQVISLESGDASIHDTVENLIILANNSLSSNGNVTESGCKECEELEEKNIKEFLQSFVHIVQMFINTS

SEQ ID NO: 937 - protein, 153 aa, Artificial Sequence
  source: /note="Description of Artificial Sequence: Synthetic polypeptide"
  source: /note="human Il-15 construct with a N terminal TorA secretion tag (sec-dependent secretion system)"
MNNNDLFQASRRRFLAQLGGLTVAGMLGPSLLTPRRATANWVNVISDLKKIEDLIQSMHIDATLYTESDVHPSCKVTAMKCFLLELQVISLESGDASIHDTVENLIILANNSLSSNGNVTESGCKECEELEEKNIKEFLQSFVHIVQMFINTS

SEQ ID NO: 938 - protein, 199 aa, Artificial Sequence
  source: /note="Description of Artificial Sequence: Synthetic polypeptide"
  source: /note="human TNFa construct with a N terminal OmpF secretion tag (sec-dependent secretion system)"
MMKRNILAVIVPALLVAGTANAGPQREEFPRDLSLISPLAQAVRSSSRTPSDKPVAHVVANPQAEGQLQWLNRRANALLANGVELRDNQLVVPSEGLYLIYSQVLFKGQGCPSTHVLLTHTISRIAVSYQTKVNLLSAIKSPCQRETPEGAEAKPWYEPIYLGGVFQLEKGDRLSAEINRPDYLDFAESGQVYFGIIAL

SEQ ID NO: 939 - protein, 198 aa, Artificial Sequence
  source: /note="Description of Artificial Sequence: Synthetic polypeptide"
  source: /note="human TNFa construct with a N terminal PhoA secretion tag"
MKQSTIALALLPLLFTPVTKAGPQREEFPRDLSLISPLAQAVRSSSRTPSDKPVAHVVANPQAEGQLQWLNRRANALLANGVELRDNQLVVPSEGLYLIYSQVLFKGQGCPSTHVLLTHTISRIAVSYQTKVNLLSAIKSPCQRETPEGAEAKPWYEPIYLGGVFQLEKGDRLSAEINRPDYLDFAESGQVYFGIIAL

SEQ ID NO: 940 - protein, 216 aa, Artificial Sequence
  source: /note="Description of Artificial Sequence: Synthetic polypeptide"
  source: /note="human TNFa construct with a N terminal TorA secretion tag (sec-dependent secretion system)"
MNNNDLFQASRRRFLAQLGGLTVAGMLGPSLLTPRRATAGPQREEFPRDLSLISPLAQAVRSSSRTPSDKPVAHVVANPQAEGQLQWLNRRANALLANGVELRDNQLVVPSEGLYLIYSQVLFKGQGCPSTHVLLTHTISRIAVSYQTKVNLLSAIKSPCQRETPEGAEAKPWYEPIYLGGVFQLEKGDRLSAEINRPDYLDFAESGQVYFGIIAL

SEQ ID NO: 941 - protein, 160 aa, Artificial Sequence
  source: /note="Description of Artificial Sequence: Synthetic polypeptide"
  source: /note="human IFNg construct with a N terminal OmpF secretion tag (sec-dependent secretion system)"
MMKRNILAVIVPALLVAGTANAQDPYVKEAENLKKYFNAGHSDVADNGTLFLGILKNWKEESDRKIMQSQIVSFYFKLFKNFKDDQSIQKSVETIKEDMNVKFFNSNKKKRDDFEKLTNYSVTDLNVQRKAIHELIQVMAELSPAAKTGKRKRSQMLFRG

SEQ ID NO: 942 - protein, 159 aa, Artificial Sequence
  source: /note="Description of Artificial Sequence: Synthetic polypeptide"
  source: /note="human IFNg construct with a N terminal PhoA secretion tag"
MKQSTIALALLPLLFTPVTKAQDPYVKEAENLKKYFNAGHSDVADNGTLFLGILKNWKEESDRKIMQSQIVSFYFKLFKNFKDDQSIQKSVETIKEDMNVKFFNSNKKKRDDFEKLTNYSVTDLNVQRKAIHELIQVMAELSPAAKTGKRKRSQMLFRG

SEQ ID NO: 943 - protein, 177 aa, Artificial Sequence
  source: /note="Description of Artificial Sequence: Synthetic polypeptide"
  source: /note="human IFNg construct with a N terminal TorA secretion tag (sec-dependent secretion system)"
MNNNDLFQASRRRFLAQLGGLTVAGMLGPSLLTPRRATAQDPYVKEAENLKKYFNAGHSDVADNGTLFLGILKNWKEESDRKIMQSQIVSFYFKLFKNFKDDQSIQKSVETIKEDMNVKFFNSNKKKRDDFEKLTNYSVTDLNVQRKAIHELIQVMAELSPAAKTGKRKRSQMLFRG

SEQ ID NO: 944-952 - skipped (9 entries)

SEQ ID NO: 953 - DNA, 657 bp, Artificial Sequence
  source: /note="Description of Artificial Sequence: Synthetic polynucleotide"
  source: /note="human IL-12a construct with a N terminal PhoA secretion tag"
atgaaacagagcacaattgctctggccttgttgccattactgtttacccctgttactaaggctaggaacctgcctgtggcaacaccagaccctgggatgttcccttgcttacatcattcccagaacctgttgcgtgcggtgtctaacatgctgcagaaagccaggcagacgctggaattctacccatgcacttccgaagagatagatcatgaagacattacgaaagacaaaacctcaacggttgaagcatgcttacctctggaattgactaagaatgaatcgtgcttaaactcaagagagaccagtttcatcactaatggctcttgcttagcgtcgcgcaagaccagcttcatgatggcgctctgcctaagtagcatctacgaggacctcaaaatgtaccaagttgaatttaaaactatgaatgccaaacttctaatggacccaaaaagacagatatttttagatcagaatatgcttgcggttattgacgaactcatgcaggcattgaattttaattccgagacggtgccacaaaaaagttctttggaggagccggacttttacaagacaaaaatcaagctgtgcatacttcttcacgcattcagaatacgggccgttacgatcgatcgcgtcatgtcgtatcttaatgcgagctga

SEQ ID NO: 954 - DNA, 987 bp, Artificial Sequence
  source: /note="Description of Artificial Sequence: Synthetic polynucleotide"
  source: /note="human IL-12b construct with a N terminal PhoA secretion tag"
atgaagcagagcacgatcgcattggcgttgctaccgctgttgtttaccccggtcacaaaagccatctgggaactgaaaaaagatgtttatgtagttgaactggattggtacccggatgcacccggtgagatggtggttttgacctgcgacacgccggaagaagatggcataacgtggaccctggatcaaagctctgaagttctgggttcaggtaagacattgacgatccaagtaaaagaatttggcgacgcaggtcagtacacctgccacaaaggtggcgaagttctgtcgcactcactcctgctcctgcacaaaaaagaggatggcatctggagtactgatatcctaaaggatcaaaaagaacctaaaaacaaaacgttcttgcgctgtgaagcgaagaactatagtggtcgctttacgtgctggtggttgactaccatttccaccgatttgaccttttctgttaagagttcgcgcggctcgtcagatccgcagggcgttacttgcggtgcggcgacgctgtcagctgagagagttcgtggggacaacaaagagtacgaatatagtgtagaatgtcaagaggattcggcgtgcccggcagcagaggagtctctccccattgaagttatggtggacgcagtgcataaactgaaatatgagaattacacatcaagcttttttattcgcgatatcatcaaaccggatcctccaaaaaatctgcaactaaagcccctgaaaaattcgcgccaagttgaggtgagctgggaatatccggatacttggtcgacaccgcattcttatttctcactgaccttctgcgttcaggttcaaggtaaatcaaaacgagaaaaaaaggatcgcgtctttaccgacaaaacgtctgctactgtaatctgccgcaagaatgcgtcaatttctgtacgtgcgcaagatcgctactactctagtagttggtctgaatgggcttcagtgccatgctcctgatga

SEQ ID NO: 955 - DNA, 657 bp, Artificial Sequence
  source: /note="Description of Artificial Sequence: Synthetic polynucleotide"
  source: /note="murine IL-12a construct with a N terminal PhoA secretion tag"
atgaaacagagtacgatagccctagccctgttgccgctcctgttcacccccgttactaaagcacgtaaccttccggtggccacgccagatccgggcatgttcccgtgcttacaccattcccagaatctgctgcgcgctgtgagtaatatgctgcagaaggcgagacaaactttggaattttacccgtgcacttcggaggagattgaccatgaggatatcacaaaagacaaaaccagtacagtggaagcctgcctgccccttgaactgactaaaaatgagagttgtttaaattcacgcgaaaccagcttcattactaacggaagctgcttagcatcgcggaaaaccagttttatgatggccctttgcctttcatctatttacgaggaccttaaaatgtatcaagttgaatttaagactatgaacgcgaaactgctaatggatcccaagcgacaaatctttcttgatcaaaatatgttggctgttattgatgaactgatgcaagccctgaattttaactcagaaaccgtacctcagaaatcgagtttagaagaacccgatttctacaaaactaaaatcaagttgtgtatccttttacatgccttccggattcgggccgtcactattgatcgcgtgatgtcgtacttgaatgcctcctaa

SEQ ID NO: 956 - DNA, 1005 bp, Artificial Sequence
  source: /note="Description of Artificial Sequence: Synthetic polynucleotide"
  source: /note="murine IL-12b construct with a N terminal PhoA secretion tag"
atgaaacagagcacgatcgcacttgcccttttgccgctgttatttaccccagtgacgaaagccatgtgggaattggaaaaagacgtgtatgttgttgaagttgactggactccggacgcgcctggtgaaactgttaatctgacttgtgatacaccggaggaagatgatataacttggactagcgatcaacgacacggcgtaatcggctctggtaagactttgaccattactgtgaaggaattcttggatgcggggcaatatacgtgtcataaaggcggcgagacgctgtcacactctcacctgttgttacataaaaaagagaatggtatatggtctacggagatcttgaaaaactttaaaaacaaaacttttttgaagtgtgaggctccaaactattctggtcgctttacctgtagttggttggtgcaacgtaacatggatctcaaatttaacataaagtcgtcttcgtcttctcccgatagccgagcggttacctgtggcatggctagtttgtcggcggagaaggtgaccttggatcaacgtgattatgaaaaatatagcgtttcgtgccaagaggacgttacgtgccctaccgctgaagagactttgccgattgaattggcactggaagcacgacaacaaaataaatacgagaattactcaactagtttcttcatccgagatatcataaaaccggaccccccgaagaatctgcaaatgaaaccgcttaaaaattcacaggtagaggtttcgtgggagtacccggatagttggtctacgcctcattcgtattttagcctgaaatttttcgttcgaatacagcgaaaaaaagagaagatgaaagaaactgaagaagggtgtaaccaaaaaggtgcatttctggtggagaaaactagcaccgaggttcaatgcaaaggcggtaacgtgtgcgtacaagctcaagaccgttattataacagtagctgttctaaatgggcttgcgtgccctgccgcgtgagatcatga

SEQ ID NO: 957 - DNA, 408 bp, Artificial Sequence
  source: /note="Description of Artificial Sequence: Synthetic polynucleotide"
  source: /note="human Il-15 construct with a N terminal PhoA secretion tag"
atgaagcaatctacgatcgcactagcgttactgccgttattgtttactcctgtgactaaggctaattgggttaatgttatatctgatttgaaaaaaatagaggatctgattcaatcaatgcacatagatgcgactctgtatactgagagcgatgtgcacccgagttgcaaagttactgctatgaaatgttttctgctggagctgcaagttatctctctggagagtggtgatgcgtctattcacgatactgttgagaatctgattattctggctaataactcgctgtcaagtaatgggaatgttacggaatctggctgtaaggagtgtgaagaattagaagaaaaaaatattaaagagtttctgcagagttttgtgcacattgttcagatgtttatcaatactagctga

SEQ ID NO: 958 - DNA, 447 bp, Artificial Sequence
  source: /note="Description of Artificial Sequence: Synthetic polynucleotide"
  source: /note="human GMCSF construct with a N terminal PhoA secretion tag"
atgaagcaatctacgatcgcgttggccttactgcccctgttattcacacccgtgaccaaagcggcaccggcccgcagcccatcaccgtcaactcaaccttgggaacatgtaaatgctattcaagaagctcgccgcctgttgaatttgagtcgcgatactgcagcagagatgaatgagactgtagaggtgatttcagaaatgtttgacctgcaggagccgacttgtttgcaaactcgcctggagctgtacaaacaaggcctgcgtggctcgctgactaaactgaaaggtcctctgacgatgatggcttctcattataaacaacactgcccgcctactccggagacgtcttgcgcgacccagataattacttttgaatcttttaaagagaatctgaaagactttctgctggttatcccgtttgattgttgggaaccggttcaagaataa

SEQ ID NO: 959 - DNA, 597 bp, Artificial Sequence
  source: /note="Description of Artificial Sequence: Synthetic polynucleotide"
  source: /note="human TNFa construct with a N terminal PhoA secretion tag"
atgaaacaatcaacgatcgctctggctctgcttccgctgctctttactccagttactaaagcgggtccgcagagggaagaattcccgcgcgatttgagcctgatttcacctcttgctcaggctgtccgctcctcttcgcgtaccccctcggataaacctgtcgcgcacgtggttgcgaacccgcaagcggaagggcagctgcaatggttaaaccgccgggctaatgcactgctggctaatggagttgagttacgcgacaaccaacttgtcgttccttcggaagggctgtatctgatctattcacaggttctctttaaagggcagggttgcccatcaacccacgtgctcctgacacacacgatcagtcgtatcgcggtatcctatcagacgaaagttaacctcctgtcagcgattaaatcgccgtgtcagagagaaactccagagggtgcggaagctaaaccgtggtatgaacctatttatcttggtggagttttccagttggaaaaaggtgatagactgtcggcagagatcaatcgccctgattacctggatttcgctgagtcgggtcaggtttatttcggaattattgcactgtga

SEQ ID NO: 960 - DNA, 480 bp, Artificial Sequence
  source: /note="Description of Artificial Sequence: Synthetic polynucleotide"
  source: /note="human IFNg construct with a N terminal PhoA secretion tag"
atgaagcaatctacgatagcactggcgttgctgccgctgctgttcaccccggttaccaaggcgcaggatccttacgttaaagaagcagagaatctgaaaaaatactttaatgcaggccacagcgatgtggcagataatggcacgttattcctgggcattctgaaaaattggaaagaagaatctgaccggaagatcatgcaatctcagatcgtatcattttatttcaagttgtttaaaaacttcaaggatgaccagtcgattcaaaaatcagtggaaacgatcaaagaagatatgaacgttaagttcttcaactcaaataaaaaaaaacgcgatgatttcgaaaaactgactaattattcggtaactgatttgaatgttcagcgcaaggcgattcatgaattgattcaggttatggcagaactgtcgccagcggcaaaaacgggtaaacgaaaacgttctcagatgttgtttcgtggttga

SEQ ID NO: 961-964 - skipped (4 entries)

SEQ ID NO: 965 - DNA, 2531 bp, Artificial Sequence
  source: /note="Description of Artificial Sequence: Synthetic polynucleotide"
  source: /note="Ptet.phoA-hIL12b-phoA-hIL12a"
ccaggatacatagattaccacaactccgagcccttccaccttaagacccactttcacatttaagttgtttttctaatccgcatatgatcaattcaaggccgaataagaaggctggctctgcaccttggtgatcaaataattcgatagcttgtcgtaataatggcggcatactatcagtagtaggtgtttccctttcttctttagcgacttgatgctcttgatcttccaatacgcaacctaaagtaaaatgccccacagcgctgagtgcatataatgcattctctagtgaaaaaccttgttggcataaaaaggctaattgattttcgagagtttcatactgtttttctgtaggccgtgtacctaaatgtacttttgctccatcgcgatgacttagtaaagcacatctaaaacttttagcgttattacgtaaaaaatcttgccagctttccccttctaaagggcaaaagtgagtatggtgcctatctaacatctcaatggctaaggcgtcgagcaaagcccgcttattttttacatgccaatacaatgtaggctgctctacacctagcttctgggcgagtttacgggttgttaaaccttcgattccgacctcattaagcagctctaatgcgctgttaatcactttacttttatctaatctagacatcattaattcctaatttttgttgacactctatcattgatagagttattttaccactccctatcagtgatagagaaaagtgaaataagtcataaatagggagtccaaaatgaagcagagcacgatcgcattggcgttgctaccgctgttgtttaccccggtcacaaaagccatctgggaactgaaaaaagatgtttatgtagttgaactggattggtacccggatgcacccggtgagatggtggttttgacctgcgacacgccggaagaagatggcataacgtggaccctggatcaaagctctgaagttctgggttcaggtaagacattgacgatccaagtaaaagaatttggcgacgcaggtcagtacacctgccacaaaggtggcgaagttctgtcgcactcactcctgctcctgcacaaaaaagaggatggcatctggagtactgatatcctaaaggatcaaaaagaacctaaaaacaaaacgttcttgcgctgtgaagcgaagaactatagtggtcgctttacgtgctggtggttgactaccatttccaccgatttgaccttttctgttaagagttcgcgcggctcgtcagatccgcagggcgttacttgcggtgcggcgacgctgtcagctgagagagttcgtggggacaacaaagagtacgaatatagtgtagaatgtcaagaggattcggcgtgcccggcagcagaggagtctctccccattgaagttatggtggacgcagtgcataaactgaaatatgagaattacacatcaagcttttttattcgcgatatcatcaaaccggatcctccaaaaaatctgcaactaaagcccctgaaaaattcgcgccaagttgaggtgagctgggaatatccggatacttggtcgacaccgcattcttatttctcactgaccttctgcgttcaggttcaaggtaaatcaaaacgagaaaaaaaggatcgcgtctttaccgacaaaacgtctgctactgtaatctgccgcaagaatgcgtcaatttctgtacgtgcgcaagatcgctactactctagtagttggtctgaatgggcttcagtgccatgctcctgatgagaaaccctacggaggaggttaatttatgaaacagagcacaattgctctggccttgttgccattactgtttacccctgttactaaggctaggaacctgcctgtggcaacaccagaccctgggatgttcccttgcttacatcattcccagaacctgttgcgtgcggtgtctaacatgctgcagaaagccaggcagacgctggaattctacccatgcacttccgaagagatagatcatgaagacattacgaaagacaaaacctcaacggttgaagcatgcttacctctggaattgactaagaatgaatcgtgcttaaactcaagagagaccagtttcatcactaatggctcttgcttagcgtcgcgcaagaccagcttcatgatggcgctctgcctaagtagcatctacgaggacctcaaaatgtaccaagttgaatttaaaactatgaatgccaaacttctaatggacccaaaaagacagatatttttagatcagaatatgcttgcggttattgacgaactcatgcaggcattgaattttaattccgagacggtgccacaaaaaagttctttggaggagccggacttttacaagacaaaaatcaagctgtgcatacttcttcacgcattcagaatacgggccgttacgatcgatcgcgtcatgtcgtatcttaatgcgagctgaaaataaaacgaaaggctcagtcgaaagactgggcctttcgttttatctgttggttccttatcatctggcgaatcggacccacaagagcactg

SEQ ID NO: 966 - DNA, 2549 bp, Artificial Sequence
  source: /note="Description of Artificial Sequence: Synthetic polynucleotide"
  source: /note="Ptet.phoA-mIL12b-phoA-mIL12a"
ccaggatacatagattaccacaactccgagcccttccaccttaagacccactttcacatttaagttgtttttctaatccgcatatgatcaattcaaggccgaataagaaggctggctctgcaccttggtgatcaaataattcgatagcttgtcgtaataatggcggcatactatcagtagtaggtgtttccctttcttctttagcgacttgatgctcttgatcttccaatacgcaacctaaagtaaaatgccccacagcgctgagtgcatataatgcattctctagtgaaaaaccttgttggcataaaaaggctaattgattttcgagagtttcatactgtttttctgtaggccgtgtacctaaatgtacttttgctccatcgcgatgacttagtaaagcacatctaaaacttttagcgttattacgtaaaaaatcttgccagctttccccttctaaagggcaaaagtgagtatggtgcctatctaacatctcaatggctaaggcgtcgagcaaagcccgcttattttttacatgccaatacaatgtaggctgctctacacctagcttctgggcgagtttacgggttgttaaaccttcgattccgacctcattaagcagctctaatgcgctgttaatcactttacttttatctaatctagacatcattaattcctaatttttgttgacactctatcattgatagagttattttaccactccctatcagtgatagagaaaagtgaatgttacacatctaaggagaaacattatgaaacagagcacgatcgcacttgcccttttgccgctgttatttaccccagtgacgaaagccatgtgggaattggaaaaagacgtgtatgttgttgaagttgactggactccggacgcgcctggtgaaactgttaatctgacttgtgatacaccggaggaagatgatataacttggactagcgatcaacgacacggcgtaatcggctctggtaagactttgaccattactgtgaaggaattcttggatgcggggcaatatacgtgtcataaaggcggcgagacgctgtcacactctcacctgttgttacataaaaaagagaatggtatatggtctacggagatcttgaaaaactttaaaaacaaaacttttttgaagtgtgaggctccaaactattctggtcgctttacctgtagttggttggtgcaacgtaacatggatctcaaatttaacataaagtcgtcttcgtcttctcccgatagccgagcggttacctgtggcatggctagtttgtcggcggagaaggtgaccttggatcaacgtgattatgaaaaatatagcgtttcgtgccaagaggacgttacgtgccctaccgctgaagagactttgccgattgaattggcactggaagcacgacaacaaaataaatacgagaattactcaactagtttcttcatccgagatatcataaaaccggaccccccgaagaatctgcaaatgaaaccgcttaaaaattcacaggtagaggtttcgtgggagtacccggatagttggtctacgcctcattcgtattttagcctgaaatttttcgttcgaatacagcgaaaaaaagagaagatgaaagaaactgaagaagggtgtaaccaaaaaggtgcatttctggtggagaaaactagcaccgaggttcaatgcaaaggcggtaacgtgtgcgtacaagctcaagaccgttattataacagtagctgttctaaatgggcttgcgtgccctgccgcgtgagatcatgagaagaagattattgaagaggtccgcatgaaacagagtacgatagccctagccctgttgccgctcctgttcacccccgttactaaagcacgtaaccttccggtggccacgccagatccgggcatgttcccgtgcttacaccattcccagaatctgctgcgcgctgtgagtaatatgctgcagaaggcgagacaaactttggaattttacccgtgcacttcggaggagattgaccatgaggatatcacaaaagacaaaaccagtacagtggaagcctgcctgccccttgaactgactaaaaatgagagttgtttaaattcacgcgaaaccagcttcattactaacggaagctgcttagcatcgcggaaaaccagttttatgatggccctttgcctttcatctatttacgaggaccttaaaatgtatcaagttgaatttaagactatgaacgcgaaactgctaatggatcccaagcgacaaatctttcttgatcaaaatatgttggctgttattgatgaactgatgcaagccctgaattttaactcagaaaccgtacctcagaaatcgagtttagaagaacccgatttctacaaaactaaaatcaagttgtgtatccttttacatgccttccggattcgggccgtcactattgatcgcgtgatgtcgtacttgaatgcctcctaaaaataaaacgaaaggctcagtcgaaagactgggcctttcgttttatctgttggttccttatcatctggcgaatcggacccacaagagcactg

SEQ ID NO: 967 - DNA, 1270 bp, Artificial Sequence
  source: /note="Description of Artificial Sequence: Synthetic polynucleotide"
  source: /note="Ptet.phoA-IL15"
ccaggatacatagattaccacaactccgagcccttccaccttaagacccactttcacatttaagttgtttttctaatccgcatatgatcaattcaaggccgaataagaaggctggctctgcaccttggtgatcaaataattcgatagcttgtcgtaataatggcggcatactatcagtagtaggtgtttccctttcttctttagcgacttgatgctcttgatcttccaatacgcaacctaaagtaaaatgccccacagcgctgagtgcatataatgcattctctagtgaaaaaccttgttggcataaaaaggctaattgattttcgagagtttcatactgtttttctgtaggccgtgtacctaaatgtacttttgctccatcgcgatgacttagtaaagcacatctaaaacttttagcgttattacgtaaaaaatcttgccagctttccccttctaaagggcaaaagtgagtatggtgcctatctaacatctcaatggctaaggcgtcgagcaaagcccgcttattttttacatgccaatacaatgtaggctgctctacacctagcttctgggcgagtttacgggttgttaaaccttcgattccgacctcattaagcagctctaatgcgctgttaatcactttacttttatctaatctagacatcattaattcctaatttttgttgacactctatcattgatagagttattttaccactccctatcagtgatagagaaaagtgaagatcaactcaagataaggaggatccatgaagcaatctacgatcgcactagcgttactgccgttattgtttactcctgtgactaaggctaattgggttaatgttatatctgatttgaaaaaaatagaggatctgattcaatcaatgcacatagatgcgactctgtatactgagagcgatgtgcacccgagttgcaaagttactgctatgaaatgttttctgctggagctgcaagttatctctctggagagtggtgatgcgtctattcacgatactgttgagaatctgattattctggctaataactcgctgtcaagtaatgggaatgttacggaatctggctgtaaggagtgtgaagaattagaagaaaaaaatattaaagagtttctgcagagttttgtgcacattgttcagatgtttatcaatactagctgaaaataaaacgaaaggctcagtcgaaagactgggcctttcgttttatctgttggttccttatcatctggcgaatcggacccacaagagcactg

SEQ ID NO: 968 - DNA, 1309 bp, Artificial Sequence
  source: /note="Description of Artificial Sequence: Synthetic polynucleotide"
  source: /note="Ptet.phoA-GMCSF"
ccaggatacatagattaccacaactccgagcccttccaccttaagacccactttcacatttaagttgtttttctaatccgcatatgatcaattcaaggccgaataagaaggctggctctgcaccttggtgatcaaataattcgatagcttgtcgtaataatggcggcatactatcagtagtaggtgtttccctttcttctttagcgacttgatgctcttgatcttccaatacgcaacctaaagtaaaatgccccacagcgctgagtgcatataatgcattctctagtgaaaaaccttgttggcataaaaaggctaattgattttcgagagtttcatactgtttttctgtaggccgtgtacctaaatgtacttttgctccatcgcgatgacttagtaaagcacatctaaaacttttagcgttattacgtaaaaaatcttgccagctttccccttctaaagggcaaaagtgagtatggtgcctatctaacatctcaatggctaaggcgtcgagcaaagcccgcttattttttacatgccaatacaatgtaggctgctctacacctagcttctgggcgagtttacgggttgttaaaccttcgattccgacctcattaagcagctctaatgcgctgttaatcactttacttttatctaatctagacatcattaattcctaatttttgttgacactctatcattgatagagttattttaccactccctatcagtgatagagaaaagtgaagaaagcaacaacatagggggaaagaatgaagcaatctacgatcgcgttggccttactgcccctgttattcacacccgtgaccaaagcggcaccggcccgcagcccatcaccgtcaactcaaccttgggaacatgtaaatgctattcaagaagctcgccgcctgttgaatttgagtcgcgatactgcagcagagatgaatgagactgtagaggtgatttcagaaatgtttgacctgcaggagccgacttgtttgcaaactcgcctggagctgtacaaacaaggcctgcgtggctcgctgactaaactgaaaggtcctctgacgatgatggcttctcattataaacaacactgcccgcctactccggagacgtcttgcgcgacccagataattacttttgaatcttttaaagagaatctgaaagactttctgctggttatcccgtttgattgttgggaaccggttcaagaataaaaataaaacgaaaggctcagtcgaaagactgggcctttcgttttatctgttggttccttatcatctggcgaatcggacccacaagagcactg

SEQ ID NO: 969 - DNA, 1459 bp, Artificial Sequence
  source: /note="Description of Artificial Sequence: Synthetic polynucleotide"
  source: /note="Ptet-phoA-TNFa"
ccaggatacatagattaccacaactccgagcccttccaccttaagacccactttcacatttaagttgtttttctaatccgcatatgatcaattcaaggccgaataagaaggctggctctgcaccttggtgatcaaataattcgatagcttgtcgtaataatggcggcatactatcagtagtaggtgtttccctttcttctttagcgacttgatgctcttgatcttccaatacgcaacctaaagtaaaatgccccacagcgctgagtgcatataatgcattctctagtgaaaaaccttgttggcataaaaaggctaattgattttcgagagtttcatactgtttttctgtaggccgtgtacctaaatgtacttttgctccatcgcgatgacttagtaaagcacatctaaaacttttagcgttattacgtaaaaaatcttgccagctttccccttctaaagggcaaaagtgagtatggtgcctatctaacatctcaatggctaaggcgtcgagcaaagcccgcttattttttacatgccaatacaatgtaggctgctctacacctagcttctgggcgagtttacgggttgttaaaccttcgattccgacctcattaagcagctctaatgcgctgttaatcactttacttttatctaatctagacatcattaattcctaatttttgttgacactctatcattgatagagttattttaccactccctatcagtgatagagaaaagtgaacacaacacagaaaggagggctgtccatgaaacaatcaacgatcgctctggctctgcttccgctgctctttactccagttactaaagcgggtccgcagagggaagaattcccgcgcgatttgagcctgatttcacctcttgctcaggctgtccgctcctcttcgcgtaccccctcggataaacctgtcgcgcacgtggttgcgaacccgcaagcggaagggcagctgcaatggttaaaccgccgggctaatgcactgctggctaatggagttgagttacgcgacaaccaacttgtcgttccttcggaagggctgtatctgatctattcacaggttctctttaaagggcagggttgcccatcaacccacgtgctcctgacacacacgatcagtcgtatcgcggtatcctatcagacgaaagttaacctcctgtcagcgattaaatcgccgtgtcagagagaaactccagagggtgcggaagctaaaccgtggtatgaacctatttatcttggtggagttttccagttggaaaaaggtgatagactgtcggcagagatcaatcgccctgattacctggatttcgctgagtcgggtcaggtttatttcggaattattgcactgtgaaaataaaacgaaaggctcagtcgaaagactgggcctttcgttttatctgttggttccttatcatctggcgaatcggacccacaagagcactg

SEQ ID NO: 970 - DNA, 1342 bp, Artificial Sequence
  source: /note="Description of Artificial Sequence: Synthetic polynucleotide"
  source: /note="Ptet-phoA-IFNg"
ccaggatacatagattaccacaactccgagcccttccaccttaagacccactttcacatttaagttgtttttctaatccgcatatgatcaattcaaggccgaataagaaggctggctctgcaccttggtgatcaaataattcgatagcttgtcgtaataatggcggcatactatcagtagtaggtgtttccctttcttctttagcgacttgatgctcttgatcttccaatacgcaacctaaagtaaaatgccccacagcgctgagtgcatataatgcattctctagtgaaaaaccttgttggcataaaaaggctaattgattttcgagagtttcatactgtttttctgtaggccgtgtacctaaatgtacttttgctccatcgcgatgacttagtaaagcacatctaaaacttttagcgttattacgtaaaaaatcttgccagctttccccttctaaagggcaaaagtgagtatggtgcctatctaacatctcaatggctaaggcgtcgagcaaagcccgcttattttttacatgccaatacaatgtaggctgctctacacctagcttctgggcgagtttacgggttgttaaaccttcgattccgacctcattaagcagctctaatgcgctgttaatcactttacttttatctaatctagacatcattaattcctaatttttgttgacactctatcattgatagagttattttaccactccctatcagtgatagagaaaagtgaacaccaccaccacgaggaggtaaaaaatgaagcaatctacgatagcactggcgttgctgccgctgctgttcaccccggttaccaaggcgcaggatccttacgttaaagaagcagagaatctgaaaaaatactttaatgcaggccacagcgatgtggcagataatggcacgttattcctgggcattctgaaaaattggaaagaagaatctgaccggaagatcatgcaatctcagatcgtatcattttatttcaagttgtttaaaaacttcaaggatgaccagtcgattcaaaaatcagtggaaacgatcaaagaagatatgaacgttaagttcttcaactcaaataaaaaaaaacgcgatgatttcgaaaaactgactaattattcggtaactgatttgaatgttcagcgcaaggcgattcatgaattgattcaggttatggcagaactgtcgccagcggcaaaaacgggtaaacgaaaacgttctcagatgttgtttcgtggttgaaaataaaacgaaaggctcagtcgaaagactgggcctttcgttttatctgttggttccttatcatctggcgaatcggacccacaagagcactg

SEQ ID NO: 971-974 - skipped (4 entries)

SEQ ID NO: 975 - DNA, 5100 bp, Artificial Sequence
  source: /note="Description of Artificial Sequence: Synthetic polynucleotide"
  source: /note="ptet-J43scFv-V5-HIS ("
agcgcccaatacgcaaaccgcctctccccgcgcgttggccgattcattaatgcagctggcacgacaggtttcccgactggaaagcgggcagtgagcgcaacgcaattaatgtgagttagctcactcattaggcaccccaggctttacactttatgcttccggctcgtatgttgtgtggaattgtgagcggataacaatttcacacaggaaacagctatgaccatgattacgccaagctatttaggtgacactatagaatactcaagctatgcatcaagcttggtaccgagctcggatccactagtaacggccgccagtgtgctggaattcgcccttttaagacccactttcacatttaagttgtttttctaatccgcagatgatcaattcaaggccgaataagaaggctggctctgcaccttggtgatcaaataattcgatagcttgtcgtaataatggcggcatactatcagtagtaggtgtttccctttcttctttagcgacttgatgctcttgatcttccaatacgcaacctaaagtaaaatgccccacagcgctgagtgcatataatgcattctctagtgaaaaaccttgttggcataaaaaggctaattgattttcgagagtttcatactgtttttctgtaggccgtgtacctaaatgtacttttgctccatcgcgatgacttagtaaagcacatctaaaacttttagcgttattacgtaaaaaatcttgccagctttccccttctaaagggcaaaagtgagtatggtgcctatctaacatctcaatggctaaggcgtcgagcaaagcccgcttattttttacatgccaatacaatgtaggctgctctacacctagcttctgggcgagtttacgggttgttaaaccttcgattccgacctcattaagcagctctaatgcgctgttaatcactttacttttatctaatctagacatcattaattcctaatttttgttgacactctatcattgatagagttattttaccactccctatcagtgatagagaaaagtgaaaggaggtaaattatgcaattggaagttcgcctgttggagagcggtggtggacttgtgaaacccgagggaagccttaaactttcgtgcgttgctagtgggttcacattttcagactatttcatgtcctgggtccgtcaagccccgggaaaaggacttgaatgggttgcccatatttacaccaagagctataactatgccacatactattctggaagcgttaaaggtcgttttaccatttcgcgtgacgacagccgttctatggtgtatttgcagatgaataaccttcgtacagaagatacggctacttactactgtactcgcgatggatcaggctatcccagtttagatttctggggacagggtactcaggttactgtttcaagcggtggaggcggctctggcggtggtgggagtggaggcggtggcagttacgagctgacgcagccaccctcggcaagtgtaaacgtgggcgaaacggtgaaaattacttgttcgggggatcaactgcccaaatacttcgccgattggtttcatcaacgttccgatcagactattttacaagtgatttatgatgataacaaacgtccgtcaggaatcccagagcgtatcagcggatcgagcagcggaacaacagcaactttgaccatccgcgatgtccgtgccgaagacgagggggactactattgtttctctggatacgtggactcagacagcaagctgtatgtttttggctcaggaacacaactgaccgtactgggcaagggcgagctcaattcgaagcttgaaggtaagcctatccctaaccctctcctcggcctcgattctacgcgtaccggtcatcatcaccatcaccattgagcatgcggtctcaggaggaagggcgaattctgcagatatccatcacactggcggccgctcgagcatgcatctagagggcccaattcgccctatagtgagtcgtattacaattcactggccgtcgttttacaacgtcgtgactgggaaaaccctggcgttacccaacttaatcgccttgcagcacatccccctttcgccagctggcgtaatagcgaagaggcccgcaccgatcgcccttcccaacagttgcgcagcctatacgtacggcagtttaaggtttacacctataaaagagagagccgttatcgtctgtttgtggatgtacagagtgatattattgacacgccggggcgacggatggtgatccccctggccagtgcacgtctgctgtcagataaagtctcccgtgaactttacccggtggtgcatatcggggatgaaagctggcgcatgatgaccaccgatatggccagtgtgccggtctccgttatcggggaagaagtggctgatctcagccaccgcgaaaatgacatcaaaaacgccattaacctgatgttctggggaatataaatgtcaggcatgagattatcaaaaaggatcttcacctagatccttttcacgtagaaagccagtccgcagaaacggtgctgaccccggatgaatgtcagctactgggctatctggacaagggaaaacgcaagcgcaaagagaaagcaggtagcttgcagtgggcttacatggcgatagctagactgggcggttttatggacagcaagcgaaccggaattgccagctggggcgccctctggtaaggttgggaagccctgcaaagtaaactggatggctttctcgccgccaaggatctgatggcgcaggggatcaagctctgatcaagagacaggatgaggatcgtttcgcatgattgaacaagatggattgcacgcaggttctccggccgcttgggtggagaggctattcggctatgactgggcacaacagacaatcggctgctctgatgccgccgtgttccggctgtcagcgcaggggcgcccggttctttttgtcaagaccgacctgtccggtgccctgaatgaactgcaagacgaggcagcgcggctatcgtggctggccacgacgggcgttccttgcgcagctgtgctcgacgttgtcactgaagcgggaagggactggctgctattgggcgaagtgccggggcaggatctcctgtcatctcaccttgctcctgccgagaaagtatccatcatggctgatgcaatgcggcggctgcatacgcttgatccggctacctgcccattcgaccaccaagcgaaacatcgcatcgagcgagcacgtactcggatggaagccggtcttgtcgatcaggatgatctggacgaagagcatcaggggctcgcgccagccgaactgttcgccaggctcaaggcgagcatgcccgacggcgaggatctcgtcgtgacccatggcgatgcctgcttgccgaatatcatggtggaaaatggccgcttttctggattcatcgactgtggccggctgggtgtggcggaccgctatcaggacatagcgttggctacccgtgatattgctgaagagcttggcggcgaatgggctgaccgcttcctcgtgctttacggtatcgccgctcccgattcgcagcgcatcgccttctatcgccttcttgacgagttcttctgaattattaacgcttacaatttcctgatgcggtattttctccttacgcatctgtgcggtatttcacaccgcatacaggtggcacttttcggggaaatgtgcgcggaacccctatttgtttatttttctaaatacattcaaatatgtatccgctcatgagacaataaccctgataaatgcttcaataatagcacgtgaggagggccaccatggccaagttgaccagtgccgttccggtgctcaccgcgcgcgacgtcgccggagcggtcgagttctggaccgaccggctcgggttctcccgggacttcgtggaggacgacttcgccggtgtggtccgggacgacgtgaccctgttcatcagcgcggtccaggaccaggtggtgccggacaacaccctggcctgggtgtgggtgcgcggcctggacgagctgtacgccgagtggtcggaggtcgtgtccacgaacttccgggacgcctccgggccggccatgaccgagatcggcgagcagccgtgggggcgggagttcgccctgcgcgacccggccggcaactgcgtgcacttcgtggccgaggagcaggactgacacgtgctaaaacttcatttttaatttaaaaggatctaggtgaagatcctttttgataatctcatgaccaaaatcccttaacgtgagttttcgttccactgagcgtcagaccccgtagaaaagatcaaaggatcttcttgagatcctttttttctgcgcgtaatctgctgcttgcaaacaaaaaaaccaccgctaccagcggtggtttgtttgccggatcaagagctaccaactctttttccgaaggtaactggcttcagcagagcgcagataccaaatactgtccttctagtgtagccgtagttaggccaccacttcaagaactctgtagcaccgcctacatacctcgctctgctaatcctgttaccagtggctgctgccagtggcgataagtcgtgtcttaccgggttggactcaagacgatagttaccggataaggcgcagcggtcgggctgaacggggggttcgtgcacacagcccagcttggagcgaacgacctacaccgaactgagatacctacagcgtgagctatgagaaagcgccacgcttcccgaagggagaaaggcggacaggtatccggtaagcggcagggtcggaacaggagagcgcacgagggagcttccagggggaaacgcctggtatctttatagtcctgtcgggtttcgccacctctgacttgagcgtcgatttttgtgatgctcgtcaggggggcggagcctatggaaaaacgccagcaacgcggcctttttacggttcctgggcttttgctggccttttgctcacatgttctttcctgcgttatcccctgattctgtggataaccgtattaccgcctttgagtgagctgataccgctcgccgcagccgaacgaccgagcgcagcgagtcagtgagcgaggaagcggaag

SEQ ID NO: 976 - DNA, 846 bp, Artificial Sequence
  source: /note="Description of Artificial Sequence: Synthetic polynucleotide"
  source: /note="J43-Anti-PD1-scFv-V5-HIS"
atgcaattggaagttcgcctgttggagagcggtggtggacttgtgaaacccgagggaagccttaaactttcgtgcgttgctagtgggttcacattttcagactatttcatgtcctgggtccgtcaagccccgggaaaaggacttgaatgggttgcccatatttacaccaagagctataactatgccacatactattctggaagcgttaaaggtcgttttaccatttcgcgtgacgacagccgttctatggtgtatttgcagatgaataaccttcgtacagaagatacggctacttactactgtactcgcgatggatcaggctatcccagtttagatttctggggacagggtactcaggttactgtttcaagcggtggaggcggctctggcggtggtgggagtggaggcggtggcagttacgagctgacgcagccaccctcggcaagtgtaaacgtgggcgaaacggtgaaaattacttgttcgggggatcaactgcccaaatacttcgccgattggtttcatcaacgttccgatcagactattttacaagtgatttatgatgataacaaacgtccgtcaggaatcccagagcgtatcagcggatcgagcagcggaacaacagcaactttgaccatccgcgatgtccgtgccgaagacgagggggactactattgtttctctggatacgtggactcagacagcaagctgtatgtttttggctcaggaacacaactgaccgtactgggcaagggcgagctcaattcgaagcttgaaggtaagcctatccctaaccctctcctcggcctcgattctacgcgtaccggtcatcatcaccatcaccattga

SEQ ID NO: 977 - DNA, 363 bp, Artificial Sequence
  source: /note="Description of Artificial Sequence: Synthetic polynucleotide"
  source: /note="scFvHeavy chain"
gaagttcgcctgttggagagcggtggtggacttgtgaaacccgagggaagccttaaactttcgtgcgttgctagtgggttcacattttcagactatttcatgtcctgggtccgtcaagccccgggaaaaggacttgaatgggttgcccatatttacaccaagagctataactatgccacatactattctggaagcgttaaaggtcgttttaccatttcgcgtgacgacagccgttctatggtgtatttgcagatgaataaccttcgtacagaagatacggctacttactactgtactcgcgatggatcaggctatcccagtttagatttctggggacagggtactcaggttactgtttcaagc

SEQ ID NO: 978 - DNA, 330 bp, Artificial Sequence
  source: /note="Description of Artificial Sequence: Synthetic polynucleotide"
  source: /note="scFvLight chain"
tacgagctgacgcagccaccctcggcaagtgtaaacgtgggcgaaacggtgaaaattacttgttcgggggatcaactgcccaaatacttcgccgattggtttcatcaacgttccgatcagactattttacaagtgatttatgatgataacaaacgtccgtcaggaatcccagagcgtatcagcggatcgagcagcggaacaacagcaactttgaccatccgcgatgtccgtgccgaagacgagggggactactattgtttctctggatacgtggactcagacagcaagctgtatgtttttggctcaggaacacaactgaccgtactgggc

SEQ ID NO: 979 - DNA, 45 bp, Artificial Sequence
  source: /note="Description of Artificial Sequence: Synthetic oligonucleotide"
  source: /note="scFvLinker"
ggtggaggcggctctggcggtggtgggagtggaggcggtggcagt

SEQ ID NO: 980 - protein, 281 aa, Artificial Sequence
  source: /note="Description of Artificial Sequence: Synthetic polypeptide"
  source: /note="J43-Anti-PD1-scFV polypeptide sequence"
MQLEVRLLESGGGLVKPEGSLKLSCVASGFTFSDYFMSWVRQAPGKGLEWVAHIYTKSYNYATYYSGSVKGRFTISRDDSRSMVYLQMNNLRTEDTATYYCTRDGSGYPSLDFWGQGTQVTVSSGGGGSGGGGSGGGGSYELTQPPSASVNVGETVKITCSGDQLPKYFADWFHQRSDQTILQVIYDDNKRPSGIPERISGSSSGTTATLTIRDVRAEDEGDYYCFSGYVDSDSKLYVFGSGTQLTVLGKGELNSKLEGKPIPNPLLGLDSTRTGHHHHHH

SEQ ID NO: 981 - DNA, 1668 bp, Artificial Sequence
  source: /note="Description of Artificial Sequence: Synthetic polynucleotide"
  source: /note="Ptet-phoA-FLAG-J43-scFv-V5-HIS"
ttaagacccactttcacatttaagttgtttttctaatccgcagatgatcaattcaaggccgaataagaaggctggctctgcaccttggtgatcaaataattcgatagcttgtcgtaataatggcggcatactatcagtagtaggtgtttccctttcttctttagcgacttgatgctcttgatcttccaatacgcaacctaaagtaaaatgccccacagcgctgagtgcatataatgcattctctagtgaaaaaccttgttggcataaaaaggctaattgattttcgagagtttcatactgtttttctgtaggccgtgtacctaaatgtacttttgctccatcgcgatgacttagtaaagcacatctaaaacttttagcgttattacgtaaaaaatcttgccagctttccccttctaaagggcaaaagtgagtatggtgcctatctaacatctcaatggctaaggcgtcgagcaaagcccgcttattttttacatgccaatacaatgtaggctgctctacacctagcttctgggcgagtttacgggttgttaaaccttcgattccgacctcattaagcagctctaatgcgctgttaatcactttacttttatctaatctagacataattaattcctaatttttgttgacactctatcattgatagagttattttaccactccctatcagtgatagagaaaagtgaaaggaggtaaattatgactagtaaacaatcgaccatcgcattggcgctgcttcctctattgttcacaccggtgacaaaggcagtcgactataaggatgacgacgacaagcaattgggcggtggcatggaagttcgcctgttggagagcggtggaggacttgtgaagcccgagggaagccttaaactttcgtgcgttgctagtgggttcacattttcagactatttcatgtcctgggtccgtcaagccccgggaaaaggacttgaatgggttgcccatatttacaccaagagctataactatgccacatactattctggaagcgttaaaggtcgttttaccatttcgcgtgacgacagccgttctatggtgtatttgcagatgaataaccttcgtacagaagatacggctacttactactgtactcgcgatggatcaggctatcccagtttagatttctggggacagggtactcaggttactgtttcaagcggtggaggcggctctggcggtggtgggagtggaggcggtggcagttacgagctgacgcagccgccctcggcaagtgtaaacgtgggcgaaacggtgaaaattacttgttcgggggatcaactgcccaaatacttcgccgattggtttcatcaacgttccgatcagactattttacaagtgatttatgatgataacaaacgtccgtcaggaatcccagagcgtatcagcggatcgagcagcggaacaacagcaactttgaccatccgcgatgtccgtgccgaagacgagggggactactattgtttctctggatacgtggactcagacagcaagctgtatgtttttggctcaggaacacaactgaccgtactgggcaagggcgagctcaattcgaagcttgaaggtaagcctatccctaaccctctcctcggactcgattctacgggatccggtcatcatcaccatcaccattga

SEQ ID NO: 982 - protein, 313 aa, Artificial Sequence
  source: /note="Description of Artificial Sequence: Synthetic polypeptide"
  source: /note="phoA-FLAG-J43-scFv-V5-HIS"
KQSTIALALLPLLFTPVTKAVDYKDDDDKQLGGGMEVRLLESGGGLVKPEGSLKLSCVASGFTFSDYFMSWVRQAPGKGLEWVAHIYTKSYNYATYYSGSVKGRFTISRDDSRSMVYLQMNNLRTEDTATYYCTRDGSGYPSLDFWGQGTQVTVSSGGGGSGGGGSGGGGSYELTQPPSASVNVGETVKITCSGDQLPKYFADWFHQRSDQTILQVIYDDNKRPSGIPERISGSSSGTTATLTIRDVRAEDEGDYYCFSGYVDSDSKLYVFGSGTQLTVLGKGELNSKLEGKPIPNPLLGLDSTGSGHHHHHH

SEQ ID NO: 983 - DNA, 1674 bp, Artificial Sequence
  source: /note="Description of Artificial Sequence: Synthetic polynucleotide"
  source: /note="Ptet-ompF-FLAG-J43-scFv-V5-HIS"
ttaagacccactttcacatttaagttgtttttctaatccgcagatgatcaattcaaggccgaataagaaggctggctctgcaccttggtgatcaaataattcgatagcttgtcgtaataatggcggcatactatcagtagtaggtgtttccctttcttctttagcgacttgatgctcttgatcttccaatacgcaacctaaagtaaaatgccccacagcgctgagtgcatataatgcattctctagtgaaaaaccttgttggcataaaaaggctaattgattttcgagagtttcatactgtttttctgtaggccgtgtacctaaatgtacttttgctccatcgcgatgacttagtaaagcacatctaaaacttttagcgttattacgtaaaaaatcttgccagctttccccttctaaagggcaaaagtgagtatggtgcctatctaacatctcaatggctaaggcgtcgagcaaagcccgcttattttttacatgccaatacaatgtaggctgctctacacctagcttctgggcgagtttacgggttgttaaaccttcgattccgacctcattaagcagctctaatgcgctgttaatcactttacttttatctaatctagacatcattaattcctaatttttgttgacactctatcattgatagagttattttaccactccctatcagtgatagagaaaagtgaaaggaggtaaattatgactagtatgatgaagcgtaacatcttagccgttattgtccccgcattgcttgtggccgggacggctaacgcagtcgactataaggatgacgacgacaagcaattgggcggtggcatggaagttcgcctgttggagagcggtggaggacttgtgaagcccgagggaagccttaaactttcgtgcgttgctagtgggttcacattttcagactatttcatgtcctgggtccgtcaagccccgggaaaaggacttgaatgggttgcccatatttacaccaagagctataactatgccacatactattctggaagcgttaaaggtcgttttaccatttcgcgtgacgacagccgttctatggtgtatttgcagatgaataaccttcgtacagaagatacggctacttactactgtactcgcgatggatcaggctatcccagtttagatttctggggacagggtactcaggttactgtttcaagcggtggaggcggctctggcggtggtgggagtggaggcggtggcagttacgagctgacgcagccgccctcggcaagtgtaaacgtgggcgaaacggtgaaaattacttgttcgggggatcaactgcccaaatacttcgccgattggtttcatcaacgttccgatcagactattttacaagtgatttatgatgataacaaacgtccgtcaggaatcccagagcgtatcagcggatcgagcagcggaacaacagcaactttgaccatccgcgatgtccgtgccgaagacgagggggactactattgtttctctggatacgtggactcagacagcaagctgtatgtttttggctcaggaacacaactgaccgtactgggcaagggcgagctcaattcgaagcttgaaggtaagcctatccctaaccctctcctcggactcgattctacgggatccggtcatcatcaccatcaccattga

SEQ ID NO: 984 - protein, 315 aa, Artificial Sequence
  source: /note="Description of Artificial Sequence: Synthetic polypeptide"
  source: /note="ompF-FLAG-J43-scFv-V5-HIS"
MMKRNILAVIVPALLVAGTANAVDYKDDDDKQLGGGMEVRLLESGGGLVKPEGSLKLSCVASGFTFSDYFMSWVRQAPGKGLEWVAHIYTKSYNYATYYSGSVKGRFTISRDDSRSMVYLQMNNLRTEDTATYYCTRDGSGYPSLDFWGQGTQVTVSSGGGGSGGGGSGGGGSYELTQPPSASVNVGETVKITCSGDQLPKYFADWFHQRSDQTILQVIYDDNKRPSGIPERISGSSSGTTATLTIRDVRAEDEGDYYCFSGYVDSDSKLYVFGSGTQLTVLGKGELNSKLEGKPIPNPLLGLDSTGSGHHHHHH

SEQ ID NO: 985 - DNA, 1668 bp, Artificial Sequence
  source: /note="Description of Artificial Sequence: Synthetic polynucleotide"
  source: /note="Ptet-PelB-FLAG-J43-scFv-V5-HIS"
ttaagacccactttcacatttaagttgtttttctaatccgcagatgatcaattcaaggccgaataagaaggctggctctgcaccttggtgatcaaataattcgatagcttgtcgtaataatggcggcatactatcagtagtaggtgtttccctttcttctttagcgacttgatgctcttgatcttccaatacgcaacctaaagtaaaatgccccacagcgctgagtgcatataatgcattctctagtgaaaaaccttgttggcataaaaaggctaattgattttcgagagtttcatactgtttttctgtaggccgtgtacctaaatgtacttttgctccatcgcgatgacttagtaaagcacatctaaaacttttagcgttattacgtaaaaaatcttgccagctttccccttctaaagggcaaaagtgagtatggtgcctatctaacatctcaatggctaaggcgtcgagcaaagcccgcttattttttacatgccaatacaatgtaggctgctctacacctagcttctgggcgagtttacgggttgttaaaccttcgattccgacctcattaagcagctctaatgcgctgttaatcactttacttttatctaatctagacatcattaattcctaatttttgttgacactctatcattgatagagttattttaccactccctatcagtgatagagaaaagtgaaaggaggtaaattatgactagtaaatatcttcttccaacggctgctgctggtttattgcttcttgccgcccagcctgcgatggctgtcgactataaggatgacgacgacaagcaattgggcggtggcatggaagttcgcctgttggagagcggtggaggacttgtgaagcccgagggaagccttaaactttcgtgcgttgctagtgggttcacattttcagactatttcatgtcctgggtccgtcaagccccgggaaaaggacttgaatgggttgcccatatttacaccaagagctataactatgccacatactattctggaagcgttaaaggtcgttttaccatttcgcgtgacgacagccgttctatggtgtatttgcagatgaataaccttcgtacagaagatacggctacttactactgtactcgcgatggatcaggctatcccagtttagatttctggggacagggtactcaggttactgtttcaagcggtggaggcggctctggcggtggtgggagtggaggcggtggcagttacgagctgacgcagccgccctcggcaagtgtaaacgtgggcgaaacggtgaaaattacttgttcgggggatcaactgcccaaatacttcgccgattggtttcatcaacgttccgatcagactattttacaagtgatttatgatgataacaaacgtccgtcaggaatcccagagcgtatcagcggatcgagcagcggaacaacagcaactttgaccatccgcgatgtccgtgccgaagacgagggggactactattgtttctctggatacgtggactcagacagcaagctgtatgtttttggctcaggaacacaactgaccgtactgggcaagggcgagctcaattcgaagcttgaaggtaagcctatccctaaccctctcctcggactcgattctacgggatccggtcatcatcaccatcaccat

SEQ ID NO: 986 - protein, 314 aa, Artificial Sequence
  source: /note="Description of Artificial Sequence: Synthetic polypeptide"
  source: /note="PelB-FLAG-J43-scFv-V5-HIS"
KYLLPTAAAGLLLLAAQPAMAVDYKDDDDKQLGGGMEVRLLESGGGLVKPEGSLKLSCVASGFTFSDYFMSWVRQAPGKGLEWVAHIYTKSYNYATYYSGSVKGRFTISRDDSRSMVYLQMNNLRTEDTATYYCTRDGSGYPSLDFWGQGTQVTVSSGGGGSGGGGSGGGGSYELTQPPSASVNVGETVKITCSGDQLPKYFADWFHQRSDQTILQVIYDDNKRPSGIPERISGSSSGTTATLTIRDVRAEDEGDYYCFSGYVDSDSKLYVFGSGTQLTVLGKGELNSKLEGKPIPNPLLGLDSTGSGHHHHHH

SEQ ID NO: 987 - DNA, 5708 bp, Artificial Sequence
  source: /note="Description of Artificial Sequence: Synthetic polynucleotide"
  source: /note="p15A-Kan-ptet-Invasin-FLAG-J43scFv-V5-HIS"
tagcggagtgtatactggcttactatgttggcactgatgagggtgtcagtgaagtgcttcatgtggcaggagaaaaaaggctgcaccggtgcgtcagcagaatatgtgatacaggatatattccgcttcctcgctcactgactcgctacgctcggtcgttcgactgcggcgagcggaaatggcttacgaacggggcggagatttcctggaagatgccaggaagatacttaacagggaagtgagagggccgcggcaaagccgtttttccataggctccgcccccctgacaagcatcacgaaatctgacgctcaaatcagtggtggcgaaacccgacaggactataaagataccaggcgtttcccctggcggctccctcgtgcgctctcctgttcctgcctttcggtttaccggtgtcattccgctgttatggccgcgtttgtctcattccacgcctgacactcagttccgggtaggcagttcgctccaagctggactgtatgcacgaaccccccgttcagtccgaccgctgcgccttatccggtaactatcgtcttgagtccaacccggaaagacatgcaaaagcaccactggcagcagccactggtaattgatttagaggagttagtcttgaagtcatgcgccggttaaggctaaactgaaaggacaagttttggtgactgcgctcctccaagccagttacctcggttcaaagagttggtagctcagagaaccttcgaaaaaccgccctgcaaggcggttttttcgttttcagagcaagagattacgcgcagaccaaaacgatctcaagaagatcatcttattaaggggtctgacgctcagtggaacggtgcaccctgcagggctagctgataaagcgttcgcgctgcattcggcagtttaagacccactttcacatttaagttgtttttctaatccgcatatgatcaattcaaggccgaataagaaggctggctctgcaccttggtgatcaaataattcgatagcttgtcgtaataatggcggcatactatcagtagtaggtgtttccctttcttctttagcgacttgatgctcttgatcttccaatacgcaacctaaagtaaaatgccccacagcgctgagtgcatataatgcattctctagtgaaaaaccttgttggcataaaaaggctaattgattttcgagagtttcatactgtttttctgtaggccgtgtacctaaatgtacttttgctccatcgcgatgacttagtaaagcacatctaaaacttttagcgttattacgtaaaaaatcttgccagctttccccttctaaagggcaaaagtgagtatggtgcctatctaacatctcaatggctaaggcgtcgagcaaagcccgcttattttttacatgccaatacaatgtaggctgctctacacctagcttctgggcgagtttacgggttgttaaaccttcgattccgacctcattaagcagctctaatgcgctgttaatcactttacttttatctaatctagacatcattaattcctaatttttgttgacactctatcattgatagagttattttaccactccctatcagtgatagagaaaagtgaaaggaggtaaattatgactagtatggttttccaacccatcagcgaatttttgctgattcgtaacgctgggatgtccatgtattttaacaagatcatttcttttaacatcatttcacgtatcgttatttgcatttttcttatctgtggtatgttcatggccggtgcatctgaaaagtatgatgcaaacgcaccccaacaggtgcagccatactcggtttcatcatcagcgttcgagaatctgcaccccaataacgagatggagtcgagtatcaacccttttagtgcttcggacaccgagcgtaatgcagctatcatcgatcgtgctaacaaggaacaagaaacggaagcagtcaacaaaatgatctccactggcgctcgtttagctgccagcggtcgcgcgtccgatgtggcgcacagtatggtaggggatgcggtcaaccaggagattaaacaatggctgaatcgcttcggcactgctcaagtgaatttaaattttgacaagaacttctcgttaaaggagtcttcgcttgactggttggccccatggtacgattcggcgtcattccttttcttttctcagttgggcatccgtaacaaggacagtcgtaatacacttaaccttggtgttggcattcgcacattagaaaatggttggttgtatggcctgaacaccttttacgacaatgacttaacgggacacaatcaccgtatcgggctgggcgccgaggcgtggactgactacttgcagttagccgcgaatgggtacttccgtcttaatggttggcactcttcccgtgacttcagcgactacaaagaacgccctgctaccgggggagatttgcgtgcgaatgcgtacctgcccgctcttccgcaacttggcgggaagttaatgtatgagcagtatactggggaacgcgtggctctgttcggaaaggacaacctgcagcgcaacccatacgctgtcactgcgggtatcaactatacgccagttccgttgctgacggtcggcgtggatcaacgtatggggaagtcgagtaaacatgaaacgcaatggaatttacaaatgaactatcgcttaggggagagtttccaaagtcagcttagcccttcggcggtcgcagggactcgtttgcttgctgagtcccgctacaacctggttgatcgcaataacaatatcgtactggaataccagaaacaacaagtggttaagctgacgttgagccctgcgaccatcagtggattgcccggacaagtttaccaggtaaatgcccaggtccagggggcctctgcggttcgcgaaattgtctggtcagacgcagaattaatcgctgcaggaggcaccttaacgccactttccactacacaattcaatttagtccttcccccatacaaacgtaccgcccaggtatcgcgcgtaactgatgacttaactgctaatttttattcactgtcggcgttagcagttgaccatcaaggcaaccgtagtaattccttcacattatctgtaacggtgcagcagccgcaactgacgcttaccgcagcggtcattggtgatggggccccagctaatgggaaaaccgcaatcactgtcgagttcacagttgcagattttgaaggcaagccgctggcgggtcaggaggttgtgattacgactaataacggtgctcttcctaataagattactgaaaagactgacgctaacggcgttgcccgcattgcccttacgaacacaaccgatggggtcacggtagttaccgcagaggtcgaggggcaacgccaatccgttgacacgcacttcgttaagggtactatcgcggccgataaaagcacgctggccgcggtcgactataaggatgacgacgacaagcaattggaagttcgcctgttggagagcggtggtggacttgtgaaacccgagggaagccttaaactttcgtgcgttgctagtgggttcacattttcagactatttcatgtcctgggtccgtcaagccccgggaaaaggacttgaatgggttgcccatatttacaccaagagctataactatgccacatactattctggaagcgttaaaggtcgttttaccatttcgcgtgacgacagccgttctatggtgtatttgcagatgaataaccttcgtacagaagatacggctacttactactgtactcgcgatggatcaggctatcccagtttagatttctggggacagggtactcaggttactgtttcaagcggtggaggcggctctggcggtggtgggagtggaggcggtggcagttacgagctgacgcagccaccctcggcaagtgtaaacgtgggcgaaacggtgaaaattacttgttcgggggatcaactgcccaaatacttcgccgattggtttcatcaacgttccgatcagactattttacaagtgatttatgatgataacaaacgtccgtcaggaatcccagagcgtatcagcggatcgagcagcggaacaacagcaactttgaccatccgcgatgtccgtgccgaagacgagggggactactattgtttctctggatacgtggactcagacagcaagctgtatgtttttggctcaggaacacaactgaccgtactgggcaagggcgagctcaattcgaagcttgaaggtaagcctatccctaaccctctcctcggcctcgattctacgcgtaccggtcatcatcaccatcaccattgagcatgctaatcagccgtggaattcgcaacgtaaaaaaacccgccccggcgggtttttttataccggtctcaggaggaacgattggtaaacccggtgaacgcatgagaaagcccccggaagatcaccttccgggggcttttttattgcgcggaccaaaacgaaaaaagacgctcgaaagcgtctcttttctggaatttggtaccgaggcgtaatgctctgccagtgttacaaccaattaaccaattctgattagaaaaactcatcgagcatcaaatgaaactgcaatttattcatatcaggattatcaataccatatttttgaaaaagccgtttctgtaatgaaggagaaaactcaccgaggcagttccataggatggcaagatcctggtatcggtctgcgattccgactcgtccaacatcaatacaacctattaatttcccctcgtcaaaaataaggttatcaagtgagaaatcaccatgagtgacgactgaatccggtgagaatggcaaaagcttatgcatttctttccagacttgttcaacaggccagccattacgctcgtcatcaaaatcactcgcatcaaccaaaccgttattcattcgtgattgcgcctgagcgagacgaaatacgcgatcgctgttaaaaggacaattacaaacaggaatcgaatgcaaccggcgcaggaacactgccagcgcatcaacaatattttcacctgaatcaggatattcttctaatacctggaatgctgttttcccggggatcgcagtggtgagtaaccatgcatcatcaggagtacggataaaatgcttgatggtcggaagaggcataaattccgtcagccagtttagtctgaccatctcatctgtaacatcattggcaacgctacctttgccatgtttcagaaacaactctggcgcatcgggcttcccatacaatcgatagattgtcgcacctgattgcccgacattatcgcgagcccatttatacccatataaatcagcatccatgttggaatttaatcgcggcctcgagcaagacgtttcccgttgaatatggctcataacaccccttgtattactgtttatgtaagcagacagttttattgttcatgatgatatatttttatcttgtgcaatgtaacatcagagattttgagacacaacgtggctttgttgaataaatcgaacttttgctgagttgaaggatcagatcacgcatcttcccgacaacgcagaccgttccgtggcaaagcaaaagttcaaaatcaccaactggtccacctacaacaaagctctcatcaaccgtggctccctcactttctggctggatgatggggcgattcaggcctggtatgagtcagcaacaccttcttcacgaggcagacctcagcgc

SEQ ID NO: 988 - DNA, 4282 bp, Artificial Sequence
  source: /note="Description of Artificial Sequence: Synthetic polynucleotide"
  source: /note="p15A-Kan-ptet-LppOmpA-FLAG-J43scFv-V5-HIS"
tagcggagtgtatactggcttactatgttggcactgatgagggtgtcagtgaagtgcttcatgtggcaggagaaaaaaggctgcaccggtgcgtcagcagaatatgtgatacaggatatattccgcttcctcgctcactgactcgctacgctcggtcgttcgactgcggcgagcggaaatggcttacgaacggggcggagatttcctggaagatgccaggaagatacttaacagggaagtgagagggccgcggcaaagccgtttttccataggctccgcccccctgacaagcatcacgaaatctgacgctcaaatcagtggtggcgaaacccgacaggactataaagataccaggcgtttcccctggcggctccctcgtgcgctctcctgttcctgcctttcggtttaccggtgtcattccgctgttatggccgcgtttgtctcattccacgcctgacactcagttccgggtaggcagttcgctccaagctggactgtatgcacgaaccccccgttcagtccgaccgctgcgccttatccggtaactatcgtcttgagtccaacccggaaagacatgcaaaagcaccactggcagcagccactggtaattgatttagaggagttagtcttgaagtcatgcgccggttaaggctaaactgaaaggacaagttttggtgactgcgctcctccaagccagttacctcggttcaaagagttggtagctcagagaaccttcgaaaaaccgccctgcaaggcggttttttcgttttcagagcaagagattacgcgcagaccaaaacgatctcaagaagatcatcttattaaggggtctgacgctcagtggaacggtgcaccctgcagggctagctgataaagcgttcgcgctgcattcggcagtttaagacccactttcacatttaagttgtttttctaatccgcatatgatcaattcaaggccgaataagaaggctggctctgcaccttggtgatcaaataattcgatagcttgtcgtaataatggcggcatactatcagtagtaggtgtttccctttcttctttagcgacttgatgctcttgatcttccaatacgcaacctaaagtaaaatgccccacagcgctgagtgcatataatgcattctctagtgaaaaaccttgttggcataaaaaggctaattgattttcgagagtttcatactgtttttctgtaggccgtgtacctaaatgtacttttgctccatcgcgatgacttagtaaagcacatctaaaacttttagcgttattacgtaaaaaatcttgccagctttccccttctaaagggcaaaagtgagtatggtgcctatctaacatctcaatggctaaggcgtcgagcaaagcccgcttattttttacatgccaatacaatgtaggctgctctacacctagcttctgggcgagtttacgggttgttaaaccttcgattccgacctcattaagcagctctaatgcgctgttaatcactttacttttatctaatctagacatcattaattcctaatttttgttgacactctatcattgatagagttattttaccactccctatcagtgatagagaaaagtgaaaggaggtaaattatgactagtaaagcaacaaaacttgtgttaggcgcggttatacttggctccaccctgcttgcaggttgctcgtctaacgcgaagatcgaccagggtatcaatccttacgtcgggtttgaaatgggatacgattggttgggacgtatgccttataagggaagtgttgaaaacggcgcttataaggcgcagggagtacagttaacggccaagcttgggtaccccataacagacgatttagatatttatacccgtttaggaggaatggtttggagagccgacacgaagtctaatgtatatggtaagaaccacgacacgggagtatcccccgtctttgcagggggagtggaatatgctatcacaccagagatcgctacccgtttggaatatcaatggacgaataatataggcgacgcccatacgataggaacgcggcccgacaacggcatccctggggtcgactataaggatgacgacgacaagcaattggaagttcgcctgttggagagcggtggtggacttgtgaaacccgagggaagccttaaactttcgtgcgttgctagtgggttcacattttcagactatttcatgtcctgggtccgtcaagccccgggaaaaggacttgaatgggttgcccatatttacaccaagagctataactatgccacatactattctggaagcgttaaaggtcgttttaccatttcgcgtgacgacagccgttctatggtgtatttgcagatgaataaccttcgtacagaagatacggctacttactactgtactcgcgatggatcaggctatcccagtttagatttctggggacagggtactcaggttactgtttcaagcggtggaggcggctctggcggtggtgggagtggaggcggtggcagttacgagctgacgcagccaccctcggcaagtgtaaacgtgggcgaaacggtgaaaattacttgttcgggggatcaactgcccaaatacttcgccgattggtttcatcaacgttccgatcagactattttacaagtgatttatgatgataacaaacgtccgtcaggaatcccagagcgtatcagcggatcgagcagcggaacaacagcaactttgaccatccgcgatgtccgtgccgaagacgagggggactactattgtttctctggatacgtggactcagacagcaagctgtatgtttttggctcaggaacacaactgaccgtactgggcaagggcgagctcaattcgaagcttgaaggtaagcctatccctaaccctctcctcggcctcgattctacgcgtaccggtcatcatcaccatcaccattgagcatgcgaattcggtctcaggaggaacgattggtaaacccggtgaacgcatgagaaagcccccggaagatcaccttccgggggcttttttattgcgcggaccaaaacgaaaaaagacgctcgaaagcgtctcttttctggaatttggtaccgaggcgtaatgctctgccagtgttacaaccaattaaccaattctgattagaaaaactcatcgagcatcaaatgaaactgcaatttattcatatcaggattatcaataccatatttttgaaaaagccgtttctgtaatgaaggagaaaactcaccgaggcagttccataggatggcaagatcctggtatcggtctgcgattccgactcgtccaacatcaatacaacctattaatttcccctcgtcaaaaataaggttatcaagtgagaaatcaccatgagtgacgactgaatccggtgagaatggcaaaagcttatgcatttctttccagacttgttcaacaggccagccattacgctcgtcatcaaaatcactcgcatcaaccaaaccgttattcattcgtgattgcgcctgagcgagacgaaatacgcgatcgctgttaaaaggacaattacaaacaggaatcgaatgcaaccggcgcaggaacactgccagcgcatcaacaatattttcacctgaatcaggatattcttctaatacctggaatgctgttttcccggggatcgcagtggtgagtaaccatgcatcatcaggagtacggataaaatgcttgatggtcggaagaggcataaattccgtcagccagtttagtctgaccatctcatctgtaacatcattggcaacgctacctttgccatgtttcagaaacaactctggcgcatcgggcttcccatacaatcgatagattgtcgcacctgattgcccgacattatcgcgagcccatttatacccatataaatcagcatccatgttggaatttaatcgcggcctcgagcaagacgtttcccgttgaatatggctcataacaccccttgtattactgtttatgtaagcagacagttttattgttcatgatgatatatttttatcttgtgcaatgtaacatcagagattttgagacacaacgtggctttgttgaataaatcgaacttttgctgagttgaaggatcagatcacgcatcttcccgacaacgcagaccgttccgtggcaaagcaaaagttcaaaatcaccaactggtccacctacaacaaagctctcatcaaccgtggctccctcactttctggctggatgatggggcgattcaggcctggtatgagtcagcaacaccttcttcacgaggcagacctcagcgc

SEQ ID NO: 989 - DNA, 5864 bp, Artificial Sequence
  source: /note="Description of Artificial Sequence: Synthetic polynucleotide"
  source: /note="p15A-Kan-ptet-IntiminN-FLAG-J43scFv-V5-HIS"
tagcggagtgtatactggcttactatgttggcactgatgagggtgtcagtgaagtgcttcatgtggcaggagaaaaaaggctgcaccggtgcgtcagcagaatatgtgatacaggatatattccgcttcctcgctcactgactcgctacgctcggtcgttcgactgcggcgagcggaaatggcttacgaacggggcggagatttcctggaagatgccaggaagatacttaacagggaagtgagagggccgcggcaaagccgtttttccataggctccgcccccctgacaagcatcacgaaatctgacgctcaaatcagtggtggcgaaacccgacaggactataaagataccaggcgtttcccctggcggctccctcgtgcgctctcctgttcctgcctttcggtttaccggtgtcattccgctgttatggccgcgtttgtctcattccacgcctgacactcagttccgggtaggcagttcgctccaagctggactgtatgcacgaaccccccgttcagtccgaccgctgcgccttatccggtaactatcgtcttgagtccaacccggaaagacatgcaaaagcaccactggcagcagccactggtaattgatttagaggagttagtcttgaagtcatgcgccggttaaggctaaactgaaaggacaagttttggtgactgcgctcctccaagccagttacctcggttcaaagagttggtagctcagagaaccttcgaaaaaccgccctgcaaggcggttttttcgttttcagagcaagagattacgcgcagaccaaaacgatctcaagaagatcatcttattaaggggtctgacgctcagtggaacggtgcaccctgcagggctagctgataaagcgttcgcgctgcattcggcagtttaagacccactttcacatttaagttgtttttctaatccgcatatgatcaattcaaggccgaataagaaggctggctctgcaccttggtgatcaaataattcgatagcttgtcgtaataatggcggcatactatcagtagtaggtgtttccctttcttctttagcgacttgatgctcttgatcttccaatacgcaacctaaagtaaaatgccccacagcgctgagtgcatataatgcattctctagtgaaaaaccttgttggcataaaaaggctaattgattttcgagagtttcatactgtttttctgtaggccgtgtacctaaatgtacttttgctccatcgcgatgacttagtaaagcacatctaaaacttttagcgttattacgtaaaaaatcttgccagctttccccttctaaagggcaaaagtgagtatggtgcctatctaacatctcaatggctaaggcgtcgagcaaagcccgcttattttttacatgccaatacaatgtaggctgctctacacctagcttctgggcgagtttacgggttgttaaaccttcgattccgacctcattaagcagctctaatgcgctgttaatcactttacttttatctaatctagacatcattaattcctaatttttgttgacactctatcattgatagagttattttaccactccctatcagtgatagagaaaagtgaaaggaggtaaattatgactagtattacgcatggctgttatacccgtacgcgtcataaacacaagttgaagaaaactctgatcatgttatccgctggacttggactttttttttacgtgaatcagaactctttcgctaatggggaaaattattttaaactgggatcagacagcaaattacttacgcatgactcataccagaatcgtctgttttatacgctgaaaactggtgaaaccgttgcagatttaagtaaaagtcaggacattaacctgtcaactatttggtcacttaataaacacttatattcgagcgaatcggaaatgatgaaagctgcaccggggcaacaaatcatcttgcccctgaagaaattgccctttgaatactccgctttgcccttgctgggctcggctcctctggtagccgccggaggcgttgccggtcacactaataagctgacaaaaatgtcacccgacgtgacgaagagcaacatgacggatgataaggctttaaattacgcagctcagcaagcggcctcgttgggaagtcagttacagagtcgttcgttaaatggtgattatgctaaggataccgcattgggtattgccggcaaccaagcgtcgagccaacttcaggcatggttgcaacattacggcactgctgaagtaaatctgcaatcaggtaataattttgacggtagttccctggatttccttttacctttttacgattcagaaaagatgttggctttcggacaggtgggggcgcgttacatcgattcacgttttaccgctaacttgggggccggtcaacgcttcttcttacctgccaatatgttgggctataatgtatttatcgaccaggacttcagtggtgacaatacacgtctgggaattggtggagagtattggcgcgattactttaagtcatctgtaaatggctattttcgcatgagcggttggcatgaaagttacaacaagaaagactacgatgagcgccccgcgaacgggtttgacatccgttttaatggttatttgccatcttatcccgccttgggagctaaattaatctacgagcaatactatggagataacgtagctttgtttaatagcgacaagttacagtctaatccaggagcggctacagtgggagttaattataccccaatcccactggtcacaatgggaatcgattatcgccacgggactggtaatgaaaacgatttattatactccatgcagtttcgttatcagttcgataagagttggtcgcagcagattgagcctcaatatgttaacgaattacgtaccttgtccggcagtcgctacgatctggtacaacgcaataacaatatcatccttgagtataagaaacaggacattctgtctttgaacattccacatgatattaatggtaccgagcactcaacacaaaaaattcagctgattgtgaaatcaaagtatggactggaccgtatcgtgtgggatgatagcgctctgcgcagtcagggtggacagatccagcactcgggtagccagtctgcccaagactaccaggctatcctgccagcgtatgtccaagggggaagtaacatctacaaagttacagctcgcgcctattaccgcaacggtaattctagtaataatgtgcagttgacaattacggtgctgtccaatgggcaggtcgtcgatcaggtaggtgtgacggattttacagccgataaaacctctgcgaaggcagataacgcggataccatcacatacactgccactgtaaaaaaaaacggtgtcgcgcaggcaaacgttcctgttagcttcaacatcgtgtcgggtacagccacccttggggccaactcggcaaagactgacgcgaatggcaaggctacagtcacgttgaaatcctcgacaccaggacaggtcgttgtgtctgccaagacagcagagatgacctccgcccttaatgcatctgctgttatcttcttcgatcaaacgaaggcatctgtcgactataaggatgacgacgacaagcaattggaagttcgcctgttggagagcggtggtggacttgtgaaacccgagggaagccttaaactttcgtgcgttgctagtgggttcacattttcagactatttcatgtcctgggtccgtcaagccccgggaaaaggacttgaatgggttgcccatatttacaccaagagctataactatgccacatactattctggaagcgttaaaggtcgttttaccatttcgcgtgacgacagccgttctatggtgtatttgcagatgaataaccttcgtacagaagatacggctacttactactgtactcgcgatggatcaggctatcccagtttagatttctggggacagggtactcaggttactgtttcaagcggtggaggcggctctggcggtggtgggagtggaggcggtggcagttacgagctgacgcagccaccctcggcaagtgtaaacgtgggcgaaacggtgaaaattacttgttcgggggatcaactgcccaaatacttcgccgattggtttcatcaacgttccgatcagactattttacaagtgatttatgatgataacaaacgtccgtcaggaatcccagagcgtatcagcggatcgagcagcggaacaacagcaactttgaccatccgcgatgtccgtgccgaagacgagggggactactattgtttctctggatacgtggactcagacagcaagctgtatgtttttggctcaggaacacaactgaccgtactgggcaagggcgagctcaattcgaagcttgaaggtaagcctatccctaaccctctcctcggcctcgattctacgcgtaccggtcatcatcaccatcaccattgagcatgctaatcagccgtggaattcgcaacgtaaaaaaacccgccccggcgggtttttttataccggtctcaggaggaacgattggtaaacccggtgaacgcatgagaaagcccccggaagatcaccttccgggggcttttttattgcgcggaccaaaacgaaaaaagacgctcgaaagcgtctcttttctggaatttggtaccgaggcgtaatgctctgccagtgttacaaccaattaaccaattctgattagaaaaactcatcgagcatcaaatgaaactgcaatttattcatatcaggattatcaataccatatttttgaaaaagccgtttctgtaatgaaggagaaaactcaccgaggcagttccataggatggcaagatcctggtatcggtctgcgattccgactcgtccaacatcaatacaacctattaatttcccctcgtcaaaaataaggttatcaagtgagaaatcaccatgagtgacgactgaatccggtgagaatggcaaaagcttatgcatttctttccagacttgttcaacaggccagccattacgctcgtcatcaaaatcactcgcatcaaccaaaccgttattcattcgtgattgcgcctgagcgagacgaaatacgcgatcgctgttaaaaggacaattacaaacaggaatcgaatgcaaccggcgcaggaacactgccagcgcatcaacaatattttcacctgaatcaggatattcttctaatacctggaatgctgttttcccggggatcgcagtggtgagtaaccatgcatcatcaggagtacggataaaatgcttgatggtcggaagaggcataaattccgtcagccagtttagtctgaccatctcatctgtaacatcattggcaacgctacctttgccatgtttcagaaacaactctggcgcatcgggcttcccatacaatcgatagattgtcgcacctgattgcccgacattatcgcgagcccatttatacccatataaatcagcatccatgttggaatttaatcgcggcctcgagcaagacgtttcccgttgaatatggctcataacaccccttgtattactgtttatgtaagcagacagttttattgttcatgatgatatatttttatcttgtgcaatgtaacatcagagattttgagacacaacgtggctttgttgaataaatcgaacttttgctgagttgaaggatcagatcacgcatcttcccgacaacgcagaccgttccgtggcaaagcaaaagttcaaaatcaccaactggtccacctacaacaaagctctcatcaaccgtggctccctcactttctggctggatgatggggcgattcaggcctggtatgagtcagcaacaccttcttcacgaggcagacctcagcgc

SEQ ID NO: 990 - protein, 607 aa, Artificial Sequence
  source: /note="Description of Artificial Sequence: Synthetic polypeptide"
  source: /note="Invasin display tag"
MVFQPISEFLLIRNAGMSMYFNKIISFNIISRIVICIFLICGMFMAGASEKYDANAPQQVQPYSVSSSAFENLHPNNEMESSINPFSASDTERNAAIIDRANKEQETEAVNKMISTGARLAASGRASDVAHSMVGDAVNQEIKQWLNRFGTAQVNLNFDKNFSLKESSLDWLAPWYDSASFLFFSQLGIRNKDSRNTLNLGVGIRTLENGWLYGLNTFYDNDLTGHNHRIGLGAEAWTDYLQLAANGYFRLNGWHSSRDFSDYKERPATGGDLRANAYLPALPQLGGKLMYEQYTGERVALFGKDNLQRNPYAVTAGINYTPVPLLTVGVDQRMGKSSKHETQWNLQMNYRLGESFQSQLSPSAVAGTRLLAESRYNLVDRNNNIVLEYQKQQVVKLTLSPATISGLPGQVYQVNAQVQGASAVREIVWSDAELIAAGGTLTPLSTTQFNLVLPPYKRTAQVSRVTDDLTANFYSLSALAVDHQGNRSNSFTLSVTVQQPQLTLTAAVIGDGAPANGKTAITVEFTVADFEGKPLAGQEVVITTNNGALPNKITEKTDANGVARIALTNTTDGVTVVTAEVEGQRQSVDTHFVKGTIAADKSTLAAV

SEQ ID NO: 991 - protein, 148 aa, Artificial Sequence
  source: /note="Description of Artificial Sequence: Synthetic polypeptide"
  source: /note="LppOmpA display tag"
KATKLVLGAVILGSTLLAGCSSNAKIDQGINPYVGFEMGYDWLGRMPYKGSVENGAYKAQGVQLTAKLGYPITDDLDIYTRLGGMVWRADTKSNVYGKNHDTGVSPVFAGGVEYAITPEIATRLEYQWTNNIGDAHTIGTRPDNGIPG

SEQ ID NO: 992 - protein, 658 aa, Artificial Sequence
  source: /note="Description of Artificial Sequence: Synthetic polypeptide"
  source: /note="IntiminN display tag"
ITHGCYTRTRHKHKLKKTLIMLSAGLGLFFYVNQNSFANGENYFKLGSDSKLLTHDSYQNRLFYTLKTGETVADLSKSQDINLSTIWSLNKHLYSSESEMMKAAPGQQIILPLKKLPFEYSALPLLGSAPLVAAGGVAGHTNKLTKMSPDVTKSNMTDDKALNYAAQQAASLGSQLQSRSLNGDYAKDTALGIAGNQASSQLQAWLQHYGTAEVNLQSGNNFDGSSLDFLLPFYDSEKMLAFGQVGARYIDSRFTANLGAGQRFFLPANMLGYNVFIDQDFSGDNTRLGIGGEYWRDYFKSSVNGYFRMSGWHESYNKKDYDERPANGFDIRFNGYLPSYPALGAKLIYEQYYGDNVALFNSDKLQSNPGAATVGVNYTPIPLVTMGIDYRHGTGNENDLLYSMQFRYQFDKSWSQQIEPQYVNELRTLSGSRYDLVQRNNNIILEYKKQDILSLNIPHDINGTEHSTQKIQLIVKSKYGLDRIVWDDSALRSQGGQIQHSGSQSAQDYQAILPAYVQGGSNIYKVTARAYYRNGNSSNNVQLTITVLSNGQVVDQVGVTDFTADKTSAKADNADTITYTATVKKNGVAQANVPVSFNIVSGTATLGANSAKTDANGKATVTLKSSTPGQVVVSAKTAEMTSALNASAVIFFDQTKAS

SEQ ID NO: 993 - DNA, 5121 bp, Artificial Sequence
  source: /note="Description of Artificial Sequence: Synthetic polynucleotide"
  source: /note="pUC-ptet-B6H12antihCD47scFv-V5-HIS"
agcgcccaatacgcaaaccgcctctccccgcgcgttggccgattcattaatgcagctggcacgacaggtttcccgactggaaagcgggcagtgagcgcaacgcaattaatgtgagttagctcactcattaggcaccccaggctttacactttatgcttccggctcgtatgttgtgtggaattgtgagcggataacaatttcacacaggaaacagctatgaccatgattacgccaagctatttaggtgacactatagaatactcaagctatgcatcaagcttggtaccgagctcggatccactagtaacggccgccagtgtgctggaattcgcccttttaagacccactttcacatttaagttgtttttctaatccgcagatgatcaattcaaggccgaataagaaggctggctctgcaccttggtgatcaaataattcgatagcttgtcgtaataatggcggcatactatcagtagtaggtgtttccctttcttctttagcgacttgatgctcttgatcttccaatacgcaacctaaagtaaaatgccccacagcgctgagtgcatataatgcattctctagtgaaaaaccttgttggcataaaaaggctaattgattttcgagagtttcatactgtttttctgtaggccgtgtacctaaatgtacttttgctccatcgcgatgacttagtaaagcacatctaaaacttttagcgttattacgtaaaaaatcttgccagctttccccttctaaagggcaaaagtgagtatggtgcctatctaacatctcaatggctaaggcgtcgagcaaagcccgcttattttttacatgccaatacaatgtaggctgctctacacctagcttctgggcgagtttacgggttgttaaaccttcgattccgacctcattaagcagctctaatgcgctgttaatcactttacttttatctaatctagacatcattaattcctaatttttgttgacactctatcattgatagagttattttaccactccctatcagtgatagagaaaagtgaaaggaggtaaattcatatgactagtcaattgggtggtagcgaggtccagctggtggaatctggcggagacttagtaaagccgggaggttcgttgaagttgagttgcgctgctagtgggtttacgtttagcggctatggtatgtcatgggtccgccaaacacccgataaacgtttagagtgggtcgccacgattacgagtggaggcacctacacctattatccggattctgtcaaaggccgctttactatttctcgtgataatgcaaagaacaccttatatttacagatcgactccttgaagtctgaggataccgcaatttatttctgtgcccgttcgttagccggtaatgctatggattattgggggcaaggcacatctgtcacagtctcatccggaggaggcggatcaggtggtggcggttctggcggcggcggatctgacattgtgatgacacaatcacctgcgacactttcggttactccaggagaccgcgttagcttgtcgtgtcgcgcctctcaaaccatcagtgactacttacattggtaccaacagaaatcccatgaatcgccacgcttacttattaagtttgcgtcccaatcaattagtggtattccgtcgcgctttagtggtagcggttctggttctgatttcacattgtcaatcaacagcgtggagccggaggatgttggtgtttactactgccaaaacggtcacggctttccacgtacattcggagggggaacgaagttggaaattaaaggcagcggcgagctcggtggcagtggtaagcctatccctaaccctctcctcggcctcgattctacgggatccggtcatcatcaccatcaccattgagcatgctaatcagccgtggaattcgaattcggtctcaggaggaagggcgaattctgcagatatccatcacactggcggccgctcgagcatgcatctagagggcccaattcgccctatagtgagtcgtattacaattcactggccgtcgttttacaacgtcgtgactgggaaaaccctggcgttacccaacttaatcgccttgcagcacatccccctttcgccagctggcgtaatagcgaagaggcccgcaccgatcgcccttcccaacagttgcgcagcctatacgtacggcagtttaaggtttacacctataaaagagagagccgttatcgtctgtttgtggatgtacagagtgatattattgacacgccggggcgacggatggtgatccccctggccagtgcacgtctgctgtcagataaagtctcccgtgaactttacccggtggtgcatatcggggatgaaagctggcgcatgatgaccaccgatatggccagtgtgccggtctccgttatcggggaagaagtggctgatctcagccaccgcgaaaatgacatcaaaaacgccattaacctgatgttctggggaatataaatgtcaggcatgagattatcaaaaaggatcttcacctagatccttttcacgtagaaagccagtccgcagaaacggtgctgaccccggatgaatgtcagctactgggctatctggacaagggaaaacgcaagcgcaaagagaaagcaggtagcttgcagtgggcttacatggcgatagctagactgggcggttttatggacagcaagcgaaccggaattgccagctggggcgccctctggtaaggttgggaagccctgcaaagtaaactggatggctttctcgccgccaaggatctgatggcgcaggggatcaagctctgatcaagagacaggatgaggatcgtttcgcatgattgaacaagatggattgcacgcaggttctccggccgcttgggtggagaggctattcggctatgactgggcacaacagacaatcggctgctctgatgccgccgtgttccggctgtcagcgcaggggcgcccggttctttttgtcaagaccgacctgtccggtgccctgaatgaactgcaagacgaggcagcgcggctatcgtggctggccacgacgggcgttccttgcgcagctgtgctcgacgttgtcactgaagcgggaagggactggctgctattgggcgaagtgccggggcaggatctcctgtcatctcaccttgctcctgccgagaaagtatccatcatggctgatgcaatgcggcggctgcatacgcttgatccggctacctgcccattcgaccaccaagcgaaacatcgcatcgagcgagcacgtactcggatggaagccggtcttgtcgatcaggatgatctggacgaagagcatcaggggctcgcgccagccgaactgttcgccaggctcaaggcgagcatgcccgacggcgaggatctcgtcgtgacccatggcgatgcctgcttgccgaatatcatggtggaaaatggccgcttttctggattcatcgactgtggccggctgggtgtggcggaccgctatcaggacatagcgttggctacccgtgatattgctgaagagcttggcggcgaatgggctgaccgcttcctcgtgctttacggtatcgccgctcccgattcgcagcgcatcgccttctatcgccttcttgacgagttcttctgaattattaacgcttacaatttcctgatgcggtattttctccttacgcatctgtgcggtatttcacaccgcatacaggtggcacttttcggggaaatgtgcgcggaacccctatttgtttatttttctaaatacattcaaatatgtatccgctcatgagacaataaccctgataaatgcttcaataatagcacgtgaggagggccaccatggccaagttgaccagtgccgttccggtgctcaccgcgcgcgacgtcgccggagcggtcgagttctggaccgaccggctcgggttctcccgggacttcgtggaggacgacttcgccggtgtggtccgggacgacgtgaccctgttcatcagcgcggtccaggaccaggtggtgccggacaacaccctggcctgggtgtgggtgcgcggcctggacgagctgtacgccgagtggtcggaggtcgtgtccacgaacttccgggacgcctccgggccggccatgaccgagatcggcgagcagccgtgggggcgggagttcgccctgcgcgacccggccggcaactgcgtgcacttcgtggccgaggagcaggactgacacgtgctaaaacttcatttttaatttaaaaggatctaggtgaagatcctttttgataatctcatgaccaaaatcccttaacgtgagttttcgttccactgagcgtcagaccccgtagaaaagatcaaaggatcttcttgagatcctttttttctgcgcgtaatctgctgcttgcaaacaaaaaaaccaccgctaccagcggtggtttgtttgccggatcaagagctaccaactctttttccgaaggtaactggcttcagcagagcgcagataccaaatactgtccttctagtgtagccgtagttaggccaccacttcaagaactctgtagcaccgcctacatacctcgctctgctaatcctgttaccagtggctgctgccagtggcgataagtcgtgtcttaccgggttggactcaagacgatagttaccggataaggcgcagcggtcgggctgaacggggggttcgtgcacacagcccagcttggagcgaacgacctacaccgaactgagatacctacagcgtgagctatgagaaagcgccacgcttcccgaagggagaaaggcggacaggtatccggtaagcggcagggtcggaacaggagagcgcacgagggagcttccagggggaaacgcctggtatctttatagtcctgtcgggtttcgccacctctgacttgagcgtcgatttttgtgatgctcgtcaggggggcggagcctatggaaaaacgccagcaacgcggcctttttacggttcctgggcttttgctggccttttgctcacatgttctttcctgcgttatcccctgattctgtggataaccgtattaccgcctttgagtgagctgataccgctcgccgcagccgaacgaccgagcgcagcgagtcagtgagcgaggaagcggaag

SEQ ID NO: 994 - protein, 240 aa, Artificial Sequence
  source: /note="Description of Artificial Sequence: Synthetic polypeptide"
  source: /note="B6H12-anti-CD47-scFv polypeptide sequence"
EVQLVESGGDLVKPGGSLKLSCAASGFTFSGYGMSWVRQTPDKRLEWVATITSGGTYTYYPDSVKGRFTISRDNAKNTLYLQIDSLKSEDTAIYFCARSLAGNAMDYWGQGTSVTVSSGGGGSGGGGSGGGGSDIVMTQSPATLSVTPGDRVSLSCRASQTISDYLHWYQQKSHESPRLLIKFASQSISGIPSRFSGSGSGSDFTLSINSVEPEDVGVYYCQNGHGFPRTFGGGTKLEIK

SEQ ID NO: 995 - DNA, 5133 bp, Artificial Sequence
  source: /note="Description of Artificial Sequence: Synthetic polynucleotide"
  source: /note="pUC-ptet-5F9antihCD47scFv-V5-HIS"
agcgcccaatacgcaaaccgcctctccccgcgcgttggccgattcattaatgcagctggcacgacaggtttcccgactggaaagcgggcagtgagcgcaacgcaattaatgtgagttagctcactcattaggcaccccaggctttacactttatgcttccggctcgtatgttgtgtggaattgtgagcggataacaatttcacacaggaaacagctatgaccatgattacgccaagctatttaggtgacactatagaatactcaagctatgcatcaagcttggtaccgagctcggatccactagtaacggccgccagtgtgctggaattcgcccttttaagacccactttcacatttaagttgtttttctaatccgcagatgatcaattcaaggccgaataagaaggctggctctgcaccttggtgatcaaataattcgatagcttgtcgtaataatggcggcatactatcagtagtaggtgtttccctttcttctttagcgacttgatgctcttgatcttccaatacgcaacctaaagtaaaatgccccacagcgctgagtgcatataatgcattctctagtgaaaaaccttgttggcataaaaaggctaattgattttcgagagtttcatactgtttttctgtaggccgtgtacctaaatgtacttttgctccatcgcgatgacttagtaaagcacatctaaaacttttagcgttattacgtaaaaaatcttgccagctttccccttctaaagggcaaaagtgagtatggtgcctatctaacatctcaatggctaaggcgtcgagcaaagcccgcttattttttacatgccaatacaatgtaggctgctctacacctagcttctgggcgagtttacgggttgttaaaccttcgattccgacctcattaagcagctctaatgcgctgttaatcactttacttttatctaatctagacatcattaattcctaatttttgttgacactctatcattgatagagttattttaccactccctatcagtgatagagaaaagtgaaaggaggtaaattcatatgactagtcaattgggtggtagccaggtgcagcttgtgcagagtggcgctgaagtgaagaaaccgggcgcatcagtgaaagtgagctgcaaagcaagcggttataccttcacgaactataacatgcactgggtacgtcaagcacccggccagcgtcttgagtggatgggcaccatttatcctggaaacgacgacacatcctacaaccaaaagtttaaggaccgcgtaactatcactgctgacacttcagcttccacagcatatatggagcttagtagcctgcgtagtgaagacacagcggtctactactgcgcacgtggagggtatcgtgcgatggactactgggggcagggcacacttgtgactgtttcatctggcggtggaggctctggaggggggggtagcggggggggcggtagcgatatcgtaatgactcagtccccactttccttacccgtcacaccgggcgaacctgcatctattagctgtcgttcgtcgcaaagcattgtttactcgaatgggaatacgtacttggggtggtatcttcaaaaaccagggcagtcccctcagttgttgatctacaaggtgtccaaccgctttagtggggtgcctgatcgtttctctggcagtggtagtggtaccgacttcacgcttaaaatttcccgtgtcgaagcagaagacgttggcgtatattactgcttccaaggcagtcatgtgccatacacgttcgggcaaggcaccaaacttgagatcaaaggcagcggcgagctcggtggcagtggtaagcctatccctaaccctctcctcggcctcgattctacgggatccggtcatcatcaccatcaccattgagcatgctaatcagccgtggaattcgaattcggtctcaggaggaagggcgaattctgcagatatccatcacactggcggccgctcgagcatgcatctagagggcccaattcgccctatagtgagtcgtattacaattcactggccgtcgttttacaacgtcgtgactgggaaaaccctggcgttacccaacttaatcgccttgcagcacatccccctttcgccagctggcgtaatagcgaagaggcccgcaccgatcgcccttcccaacagttgcgcagcctatacgtacggcagtttaaggtttacacctataaaagagagagccgttatcgtctgtttgtggatgtacagagtgatattattgacacgccggggcgacggatggtgatccccctggccagtgcacgtctgctgtcagataaagtctcccgtgaactttacccggtggtgcatatcggggatgaaagctggcgcatgatgaccaccgatatggccagtgtgccggtctccgttatcggggaagaagtggctgatctcagccaccgcgaaaatgacatcaaaaacgccattaacctgatgttctggggaatataaatgtcaggcatgagattatcaaaaaggatcttcacctagatccttttcacgtagaaagccagtccgcagaaacggtgctgaccccggatgaatgtcagctactgggctatctggacaagggaaaacgcaagcgcaaagagaaagcaggtagcttgcagtgggcttacatggcgatagctagactgggcggttttatggacagcaagcgaaccggaattgccagctggggcgccctctggtaaggttgggaagccctgcaaagtaaactggatggctttctcgccgccaaggatctgatggcgcaggggatcaagctctgatcaagagacaggatgaggatcgtttcgcatgattgaacaagatggattgcacgcaggttctccggccgcttgggtggagaggctattcggctatgactgggcacaacagacaatcggctgctctgatgccgccgtgttccggctgtcagcgcaggggcgcccggttctttttgtcaagaccgacctgtccggtgccctgaatgaactgcaagacgaggcagcgcggctatcgtggctggccacgacgggcgttccttgcgcagctgtgctcgacgttgtcactgaagcgggaagggactggctgctattgggcgaagtgccggggcaggatctcctgtcatctcaccttgctcctgccgagaaagtatccatcatggctgatgcaatgcggcggctgcatacgcttgatccggctacctgcccattcgaccaccaagcgaaacatcgcatcgagcgagcacgtactcggatggaagccggtcttgtcgatcaggatgatctggacgaagagcatcaggggctcgcgccagccgaactgttcgccaggctcaaggcgagcatgcccgacggcgaggatctcgtcgtgacccatggcgatgcctgcttgccgaatatcatggtggaaaatggccgcttttctggattcatcgactgtggccggctgggtgtggcggaccgctatcaggacatagcgttggctacccgtgatattgctgaagagcttggcggcgaatgggctgaccgcttcctcgtgctttacggtatcgccgctcccgattcgcagcgcatcgccttctatcgccttcttgacgagttcttctgaattattaacgcttacaatttcctgatgcggtattttctccttacgcatctgtgcggtatttcacaccgcatacaggtggcacttttcggggaaatgtgcgcggaacccctatttgtttatttttctaaatacattcaaatatgtatccgctcatgagacaataaccctgataaatgcttcaataatagcacgtgaggagggccaccatggccaagttgaccagtgccgttccggtgctcaccgcgcgcgacgtcgccggagcggtcgagttctggaccgaccggctcgggttctcccgggacttcgtggaggacgacttcgccggtgtggtccgggacgacgtgaccctgttcatcagcgcggtccaggaccaggtggtgccggacaacaccctggcctgggtgtgggtgcgcggcctggacgagctgtacgccgagtggtcggaggtcgtgtccacgaacttccgggacgcctccgggccggccatgaccgagatcggcgagcagccgtgggggcgggagttcgccctgcgcgacccggccggcaactgcgtgcacttcgtggccgaggagcaggactgacacgtgctaaaacttcatttttaatttaaaaggatctaggtgaagatcctttttgataatctcatgaccaaaatcccttaacgtgagttttcgttccactgagcgtcagaccccgtagaaaagatcaaaggatcttcttgagatcctttttttctgcgcgtaatctgctgcttgcaaacaaaaaaaccaccgctaccagcggtggtttgtttgccggatcaagagctaccaactctttttccgaaggtaactggcttcagcagagcgcagataccaaatactgtccttctagtgtagccgtagttaggccaccacttcaagaactctgtagcaccgcctacatacctcgctctgctaatcctgttaccagtggctgctgccagtggcgataagtcgtgtcttaccgggttggactcaagacgatagttaccggataaggcgcagcggtcgggctgaacggggggttcgtgcacacagcccagcttggagcgaacgacctacaccgaactgagatacctacagcgtgagctatgagaaagcgccacgcttcccgaagggagaaaggcggacaggtatccggtaagcggcagggtcggaacaggagagcgcacgagggagcttccagggggaaacgcctggtatctttatagtcctgtcgggtttcgccacctctgacttgagcgtcgatttttgtgatgctcgtcaggggggcggagcctatggaaaaacgccagcaacgcggcctttttacggttcctgggcttttgctggccttttgctcacatgttctttcctgcgttatcccctgattctgtggataaccgtattaccgcctttgagtgagctgataccgctcgccgcagccgaacgaccgagcgcagcgagtcagtgagcgaggaagcggaag

SEQ ID NO: 996 - protein, 244 aa, Artificial Sequence
  source: /note="Description of Artificial Sequence: Synthetic polypeptide"
  source: /note="5F9-anti-CD47-scFv polypeptide sequence"
QVQLVQSGAEVKKPGASVKVSCKASGYTFTNYNMHWVRQAPGQRLEWMGTIYPGNDDTSYNQKFKDRVTITADTSASTAYMELSSLRSEDTAVYYCARGGYRAMDYWGQGTLVTVSSGGGGSGGGGSGGGGSDIVMTQSPLSLPVTPGEPASISCRSSQSIVYSNGNTYLGWYLQKPGQSPQLLIYKVSNRFSGVPDRFSGSGSGTDFTLKISRVEAEDVGVYYCFQGSHVPYTFGQGTKLEIK

SEQ ID NO: 997 - DNA, 2555 bp, Artificial Sequence
  source: /note="Description of Artificial Sequence: Synthetic polynucleotide"
  source: /note="Biosafety Plasmid System Component  dap A"
actcttcctttttcaatattattgaagcatttatcagggttattgtctcatgagcggatacatatttgaatgtatttagaaaaataaacaaataggggaattaaaaaaaagcccgctcattaggcgggctactacctaggccgcggccgcgcgaattcgagctcggtacccggggatcctctagagtcgacctgcaggcatgcaagcttgcggccgcgtcgtgactgggaaaaccctggcgactagtcttggactcctgttgatagatccagtaatgacctcagaactccatctggatttgttcagaacgctcggttgccgccgggcgttttttattggtgagaatccaggggtccccaataattacgatttaaatcacagcaaacaccacgtcggccctatcagctgcgtgctttctatgagtcgttgctgcataacttgacaattaacatccggctcgtagggtttgtggagggcccaagttcacttaaaaaggagatcaacaatgaaagcaattttcgtactgaaacatcttaatcatgctggggagggtttctaatgttcacgggaagtattgtcgcgattgttactccgatggatgaaaaaggtaatgtctgtcgggctagcttgaaaaaactgattgattatcatgtcgccagcggtacttcggcgatcgtttctgttggcaccactggcgagtccgctaccttaaatcatgacgaacatgctgatgtggtgatgatgacgctggatctggctgatgggcgcattccggtaattgccgggaccggcgctaacgctactgcggaagccattagcctgacgcagcgcttcaatgacagtggtatcgtcggctgcctgacggtaaccccttactacaatcgtccgtcgcaagaaggtttgtatcagcatttcaaagccatcgctgagcatactgacctgccgcaaattctgtataatgtgccgtcccgtactggctgcgatctgctcccggaaacggtgggccgtctggcgaaagtaaaaaatattatcggaatcaaagaggcaacagggaacttaacgcgtgtaaaccagatcaaagagctggtttcagatgattttgttctgctgagcggcgatgatgcgagcgcgctggacttcatgcaattgggcggtcatggggttatttccgttacggctaacgtcgcagcgcgtgatatggcccagatgtgcaaactggcagcagaagggcattttgccgaggcacgcgttattaatcagcgtctgatgccattacacaacaaactatttgtcgaacccaatccaatcccggtgaaatgggcatgtaaggaactgggtcttgtggcgaccgatacgctgcgcctgccaatgacaccaatcaccgacagtggccgtgagacggtcagagcggcgcttaaacatgccggtttgctgtaagacttttgtcaggttcctactgtgacgactaccaccgatagactggagtgttgctgcgaaaaaaccccgccgaagcggggttttttgcgagaagtcaccacgattgtgctttacacggagtagtcggcagttccttaagtcagaatagtggacaggcggccaagaacttcgttcatgatagtctccggaacccgttcgagtcgttttccgccccgtgctttcatatcaattgtccggggttgatcgcaacgtacaacacctgtggtacgtatgccaacaccatccaacgacaccgcaaagccggcagtgcgggcaaaattgcctccgctggttacgggcacaacaacaggcaggcgggtcacgcgattaaaggccgccggtgtgacaatcagcaccggccgcgttccctgctgctcatgacctgcggtaggatcaagcgagacaagccagatttcccctctttccatctagtataactattgtttctctagtaacatttattgtacaacacgagcccatttttgtcaaataaattttaaattatatcaacgttaataagacgttgtcaataaaattattttgacaaaattggccggccggcgcgccgatctgaagatcagcagttcaacctgttgatagtacgtactaagctctcatgtttcacgtactaagctctcatgtttaacgtactaagctctcatgtttaacgaactaaaccctcatggctaacgtactaagctctcatggctaacgtactaagctctcatgtttcacgtactaagctctcatgtttgaacaataaaattaatataaatcagcaacttaaatagcctctaaggttttaagttttataagaaaaaaaagaatatataaggcttttaaagcctttaaggtttaacggttgtggacaacaagccagggatgtaacgcactgagaagcccttagagcctctcaaagcaattttgagtgacacaggaacacttaacggctgacatggggcgcgcccagctgtctagggcggcggatttgtcctactcaggagagcgttcaccgacaaacaacagataaaacgaaaggcccagtctttcgactgagcctttcgttttatttgatgcct

SEQ ID NO: 998 - DNA, 2472 bp, Artificial Sequence
  source: /note="Description of Artificial Sequence: Synthetic polynucleotide"
  source: /note="Biosafety Plasmid System Component  ThyA"
actcttcctttttcaatattattgaagcatttatcagggttattgtctcatgagcggatacatatttgaatgtatttagaaaaataaacaaataggggaattaaaaaaaagcccgctcattaggcgggctactacctaggccgcggccgcgcgaattcgagctcggtacccggggatcctctagagtcgacctgcaggcatgcaagcttgcggccgcgtcgtgactgggaaaaccctggcgactagtcttggactcctgttgatagatccagtaatgacctcagaactccatctggatttgttcagaacgctcggttgccgccgggcgttttttattggtgagaatccaggggtccccaataattacgatttaaatcacagcaaacaccacgtcggccctatcagctgcgtgctttctatgagtcgttgctgcataacttgacaattaatcatccggctcgtagggtttgtggagggcccaagttcacttaaaaaggagatcaacaatgaaagcaattttcgtactgaaacatcttaatcatgctggggagggtttctaatgaaacagtatttagaactgatgcaaaaagtgctcgacgaaggcacacagaaaaacgaccgtaccggaaccggaacgctttccatttttggtcatcagatgcgttttaacctgcaagatggattcccgctggtgacaactaaacgttgccacctgcgttccatcatccatgaactgctgtggtttcttcagggcgacactaacattgcttatctacacgaaaacaatgtcaccatctgggacgaatgggccgatgaaaacggcgacctcgggccagtgtatggtaaacagtggcgtgcctggccaacgccagatggtcgtcatattgaccagatcactacggtactgaaccagctgaaaaacgacccggattcgcgccgcattattgtttcagcgtggaacgtaggcgaactggataaaatggcgctggcaccgtgccatgcattcttccagttctatgtggcagacggcaaactctcttgccagctttatcagcgctcctgtgacgtcttcctcggcctgccgttcaacattgccagctacgcgttattggtgcatatgatggcgcagcagtgcgatctggaagtgggtgattttgtctggaccggtggcgacacgcatctgtacagcaaccatatggatcaaactcatctgcaattaagccgcgaaccgcgtccgctgccgaagttgattatcaaacgtaaacccgaatccatcttcgactaccgtttcgaagactttgagattgaaggctacgatccgcatccgggcattaaagcgccggtggctatctaagacttttgtcaggttcctactgtgacgactaccaccgatagactggagtgttgctgcgaaaaaaccccgccgaagcggggttttttgcgagaagtcaccacgattgtgctttacacggagtagtcggcagttccttaagtcagaatagtggacaggcggccaagaacttcgttcatgatagtctccggaacccgttcgagtcgttttccgccccgtgctttcatatcaattgtccggggttgatcgcaacgtacaacacctgtggtacgtatgccaacaccatccaacgacaccgcaaagccggcagtgcgggcaaaattgcctccgctggttacgggcacaacaacaggcaggcgggtcacgcgattaaaggccgccggtgtgacaatcagcaccggccgcgttccctgctgctcatgacctgcggtaggatcaagcgagacaagccagatttcccctctttccatctagtataactattgtttctctagtaacatttattgtacaacacgagcccatttttgtcaaataaattttaaattatatcaacgttaataagacgttgtcaataaaattattttgacaaaattggccggccggcgcgccgatctgaagatcagcagttcaacctgttgatagtacgtactaagctctcatgtttcacgtactaagctctcatgtttaacgtactaagctctcatgtttaacgaactaaaccctcatggctaacgtactaagctctcatggctaacgtactaagctctcatgtttcacgtactaagctctcatgtttgaacaataaaattaatataaatcagcaacttaaatagcctctaaggttttaagttttataagaaaaaaaagaatatataaggcttttaaagcctttaaggtttaacggttgtggacaacaagccagggatgtaacgcactgagaagcccttagagcctctcaaagcaattttgagtgacacaggaacacttaacggctgacatggggcgcgcccagctgtctagggcggcggatttgtcctactcaggagagcgttcaccgacaaacaacagataaaacgaaaggcccagtctttcgactgagcctttcgttttatttgatgcct

SEQ ID NO: 999 - DNA, 333 bp, Artificial Sequence
  source: /note="Description of Artificial Sequence: Synthetic polynucleotide"
  source: /note="Kid toxin (reverse orientation)"
ttaagtcagaatagtggacaggcggccaagaacttcgttcatgatagtctccggaacccgttcgagtcgttttccgccccgtgctttcatatcaattgtccggggttgatcgcaacgtacaacacctgtggtacgtatgccaacaccatccaacgacaccgcaaagccggcagtgcgggcaaaattgcctccgctggttacgggcacaacaacaggcaggcgggtcacgcgattaaaggccgccggtgtgacaatcagcaccggccgcgttccctgctgctcatgacctgcggtaggatcaagcgagacaagccagatttcccctctttccat

SEQ ID NO: 1000 - DNA, 879 bp, Artificial Sequence
  source: /note="Description of Artificial Sequence: Synthetic polynucleotide"
  source: /note="dapA"
atgttcacgggaagtattgtcgcgattgttactccgatggatgaaaaaggtaatgtctgtcgggctagcttgaaaaaactgattgattatcatgtcgccagcggtacttcggcgatcgtttctgttggcaccactggcgagtccgctaccttaaatcatgacgaacatgctgatgtggtgatgatgacgctggatctggctgatgggcgcattccggtaattgccgggaccggcgctaacgctactgcggaagccattagcctgacgcagcgcttcaatgacagtggtatcgtcggctgcctgacggtaaccccttactacaatcgtccgtcgcaagaaggtttgtatcagcatttcaaagccatcgctgagcatactgacctgccgcaaattctgtataatgtgccgtcccgtactggctgcgatctgctcccggaaacggtgggccgtctggcgaaagtaaaaaatattatcggaatcaaagaggcaacagggaacttaacgcgtgtaaaccagatcaaagagctggtttcagatgattttgttctgctgagcggcgatgatgcgagcgcgctggacttcatgcaattgggcggtcatggggttatttccgttacggctaacgtcgcagcgcgtgatatggcccagatgtgcaaactggcagcagaagggcattttgccgaggcacgcgttattaatcagcgtctgatgccattacacaacaaactatttgtcgaacccaatccaatcccggtgaaatgggcatgtaaggaactgggtcttgtggcgaccgatacgctgcgcctgccaatgacaccaatcaccgacagtggccgtgagacggtcagagcggcgcttaaacatgccggtttgctgtaa

SEQ ID NO: 1001 - DNA, 795 bp, Artificial Sequence
  source: /note="Description of Artificial Sequence: Synthetic polynucleotide"
  source: /note="thyA"
atgaaacagtatttagaactgatgcaaaaagtgctcgacgaaggcacacagaaaaacgaccgtaccggaaccggaacgctttccatttttggtcatcagatgcgttttaacctgcaagatggattcccgctggtgacaactaaacgttgccacctgcgttccatcatccatgaactgctgtggtttcttcagggcgacactaacattgcttatctacacgaaaacaatgtcaccatctgggacgaatgggccgatgaaaacggcgacctcgggccagtgtatggtaaacagtggcgtgcctggccaacgccagatggtcgtcatattgaccagatcactacggtactgaaccagctgaaaaacgacccggattcgcgccgcattattgtttcagcgtggaacgtaggcgaactggataaaatggcgctggcaccgtgccatgcattcttccagttctatgtggcagacggcaaactctcttgccagctttatcagcgctcctgtgacgtcttcctcggcctgccgttcaacattgccagctacgcgttattggtgcatatgatggcgcagcagtgcgatctggaagtgggtgattttgtctggaccggtggcgacacgcatctgtacagcaaccatatggatcaaactcatctgcaattaagccgcgaaccgcgtccgctgccgaagttgattatcaaacgtaaacccgaatccatcttcgactaccgtttcgaagactttgagattgaaggctacgatccgcatccgggcattaaagcgccggtggctatctaa

SEQ ID NO: 1002 - protein, 110 aa, Artificial Sequence
  source: /note="Description of Artificial Sequence: Synthetic polypeptide"
  source: /note="Kid toxin polypeptide"
MERGEIWLVSLDPTAGHEQQGTRPVLIVTPAAFNRVTRLPVVVPVTSGGNFARTAGFAVSLDGVGIRTTGVVRCDQPRTIDMKARGGKRLERVPETIMNEVLGRLSTILT

SEQ ID NO: 1003 - protein, 292 aa, Artificial Sequence
  source: /note="Description of Artificial Sequence: Synthetic polypeptide"
  source: /note="dapA polypeptide"
MFTGSIVAIVTPMDEKGNVCRASLKKLIDYHVASGTSAIVSVGTTGESATLNHDEHADVVMMTLDLADGRIPVIAGTGANATAEAISLTQRFNDSGIVGCLTVTPYYNRPSQEGLYQHFKAIAEHTDLPQILYNVPSRTGCDLLPETVGRLAKVKNIIGIKEATGNLTRVNQIKELVSDDFVLLSGDDASALDFMQLGGHGVISVTANVAARDMAQMCKLAAEGHFAEARVINQRLMPLHNKLFVEPNPIPVKWACKELGLVATDTLRLPMTPITDSGRETVRAALKHAGLL

SEQ ID NO: 1004 - protein, 264 aa, Artificial Sequence
  source: /note="Description of Artificial Sequence: Synthetic polypeptide"
  source: /note="ThyA polypeptide"
MKQYLELMQKVLDEGTQKNDRTGTGTLSIFGHQMRFNLQDGFPLVTTKRCHLRSIIHELLWFLQGDTNIAYLHENNVTIWDEWADENGDLGPVYGKQWRAWPTPDGRHIDQITTVLNQLKNDPDSRRIIVSAWNVGELDKMALAPCHAFFQFYVADGKLSCQLYQRSCDVFLGLPFNIASYALLVHMMAQQCDLEVGDFVWTGGDTHLYSNHMDQTHLQLSREPRPLPKLIIKRKPESIFDYRFEDFEIEGYDPHPGIKAPVAI

SEQ ID NO: 1005 - DNA, 1490 bp, Artificial Sequence
  source: /note="Description of Artificial Sequence: Synthetic polynucleotide"
  source: /note="Biosafety Chromosomal Construct -  low copy Rep (Pi) and Kis antitoxin (as shown in Fig. 76C)"
ttgacggctagctcagtcctaggtacagtgctagcggatctgctggaacaggtggtgagactcaaggtcatgatggacgtgaacaaaaaaacgaaaattcgccaccgaaacgagctaaatcacaccctggctcaacttcctttgcccgcaaagcgagtgatgtatatggcgcttgctcccattgatagcaaagaacctcttgaacgagggcgagttttcaaaattagggctgaagaccttgcagcgctcgccaaaatcaccccatcgcttgcttatcgacaattaaaagagggtggtaaattacttggtgccagcaaaatttcgctaagaggggatgatatcattgctttagctaaagagcttaacctgctctttactgctaaaaactcccctgaagagttagaccttaacattattgagtggatagcttattcaaatgatgaaggatacttgtctttaaaattcaccagaaccatagaaccatatatctctagccttattgggaaaaaaaataaattcacaacgcaattgttaacggcaagcttacgcttaagtagccagtattcatcttctctttatcaacttatcaggaagcattactctaattttaagaagaaaaattattttattatttccgttgatgagttaaaggaagagttaatagcttatacttttgataaagatggaaatattgagtacaaataccctgactttcctatttttaaaagggatgtgttaaataaagccattgctgaaattaaaaagaaaacagaaatatcgtttgttggcttcactgttcatgaaaaagaaggaagaaaaattagtaagctgaagttcgaatttgtcgttgatgaagatgaattttctggcgataaagatgatgaagctttttttatgaatttatctgaagctgatgcagcttttctcaaggtatttgatgaaaccgtacctcccaaaaaagctaaggggtgaggatctccaggcatcaaataaaacgaaaggctcagtcgaaagactgggcctttcgttttatctgttgtttgtcggtgaacgctctctactagagtcacactggctcaccttcgggtgggcctttctgcgtttatacccgggaaaaagagtattgacttaaagtctaacctataggtataatgtgtggagaccagaggtaaggaggtaacaaccatgcgagtgttgaagaaacatcttaatcatgctaaggaggttttctaatgcataccacccgactgaagagggttggcggctcagttatgctgaccgtcccaccggcactgctgaatgcgctgtctctgggcacagataatgaagttggcatggtcattgataatggccggctgattgttgagccgtacagacgcccgcaatattcactggctgagctactggcacagtgtgatccgaatgctgaaatatcagctgaagaacgagaatggctggatgcaccggcgactggtcaggaggaaatctga

SEQ ID NO: 1006 - DNA, 1490 bp, Artificial Sequence
  source: /note="Description of Artificial Sequence: Synthetic polynucleotide"
  source: /note="Biosafety Chromosomal Construct -  medium copy Rep (Pi) and Kis antitoxin (as shown in Fig. 76D)"
ttgacggctagctcagtcctaggtacagtgctagcggatcttccggaagactaggtgagactcaaggtcatgatggacgtgaacaaaaaaacgaaaattcgccaccgaaacgagctaaatcacaccctggctcaacttcctttgcccgcaaagcgagtgatgtatatggcgcttgctcccattgatagcaaagaacctcttgaacgagggcgagttttcaaaattagggctgaagaccttgcagcgctcgccaaaatcaccccatcgcttgcttatcgacaattaaaagagggtggtaaattacttggtgccagcaaaatttcgctaagaggggatgatatcattgctttagctaaagagcttaacctgctctttactgctaaaaactcccctgaagagttagaccttaacattattgagtggatagcttattcaaatgatgaaggatacttgtctttaaaattcaccagaaccatagaaccatatatctctagccttattgggaaaaaaaataaattcacaacgcaattgttaacggcaagcttacgcttaagtagccagtattcatcttctctttatcaacttatcaggaagcattactctaattttaagaagaaaaattattttattatttccgttgatgagttaaaggaagagttaatagcttatacttttgataaagatggaaatattgagtacaaataccctgactttcctatttttaaaagggatgtgttaaataaagccattgctgaaattaaaaagaaaacagaaatatcgtttgttggcttcactgttcatgaaaaagaaggaagaaaaattagtaagctgaagttcgaatttgtcgttgatgaagatgaattttctggcgataaagatgatgaagctttttttatgaatttatctgaagctgatgcagcttttctcaaggtatttgatgaaaccgtacctcccaaaaaagctaaggggtgaggatctccaggcatcaaataaaacgaaaggctcagtcgaaagactgggcctttcgttttatctgttgtttgtcggtgaacgctctctactagagtcacactggctcaccttcgggtgggcctttctgcgtttatacccgggaaaaagagtattgacttaaagtctaacctataggtataatgtgtggagaccagaggtaaggaggtaacaaccatgcgagtgttgaagaaacatcttaatcatgctaaggaggttttctaatgcataccacccgactgaagagggttggcggctcagttatgctgaccgtcccaccggcactgctgaatgcgctgtctctgggcacagataatgaagttggcatggtcattgataatggccggctgattgttgagccgtacagacgcccgcaatattcactggctgagctactggcacagtgtgatccgaatgctgaaatatcagctgaagaacgagaatggctggatgcaccggcgactggtcaggaggaaatctga

SEQ ID NO: 1007 - DNA, 917 bp, Artificial Sequence
  source: /note="Description of Artificial Sequence: Synthetic polynucleotide"
  source: /note="Rep (Pi)"
tgagactcaaggtcatgatggacgtgaacaaaaaaacgaaaattcgccaccgaaacgagctaaatcacaccctggctcaacttcctttgcccgcaaagcgagtgatgtatatggcgcttgctcccattgatagcaaagaacctcttgaacgagggcgagttttcaaaattagggctgaagaccttgcagcgctcgccaaaatcaccccatcgcttgcttatcgacaattaaaagagggtggtaaattacttggtgccagcaaaatttcgctaagaggggatgatatcattgctttagctaaagagcttaacctgctctttactgctaaaaactcccctgaagagttagaccttaacattattgagtggatagcttattcaaatgatgaaggatacttgtctttaaaattcaccagaaccatagaaccatatatctctagccttattgggaaaaaaaataaattcacaacgcaattgttaacggcaagcttacgcttaagtagccagtattcatcttctctttatcaacttatcaggaagcattactctaattttaagaagaaaaattattttattatttccgttgatgagttaaaggaagagttaatagcttatacttttgataaagatggaaatattgagtacaaataccctgactttcctatttttaaaagggatgtgttaaataaagccattgctgaaattaaaaagaaaacagaaatatcgtttgttggcttcactgttcatgaaaaagaaggaagaaaaattagtaagctgaagttcgaatttgtcgttgatgaagatgaattttctggcgataaagatgatgaagctttttttatgaatttatctgaagctgatgcagcttttctcaaggtatttgatgaaaccgtacctcccaaaaaagctaaggggtga

SEQ ID NO: 1008 - DNA, 255 bp, Artificial Sequence
  source: /note="Description of Artificial Sequence: Synthetic polynucleotide"
  source: /note="Kis antitoxin"
cataccacccgactgaagagggttggcggctcagttatgctgaccgtcccaccggcactgctgaatgcgctgtctctgggcacagataatgaagttggcatggtcattgataatggccggctgattgttgagccgtacagacgcccgcaatattcactggctgagctactggcacagtgtgatccgaatgctgaaatatcagctgaagaacgagaatggctggatgcaccggcgactggtcaggaggaaatctga

SEQ ID NO: 1009 - DNA, 14 bp, Artificial Sequence
  source: /note="Description of Artificial Sequence: Synthetic oligonucleotide"
  source: /note="RBS (low copy)"
gctggaacaggtgg

SEQ ID NO: 1010 - DNA, 14 bp, Artificial Sequence
  source: /note="Description of Artificial Sequence: Synthetic oligonucleotide"
  source: /note="RBS (medium copy)"
tccggaagactagg

SEQ ID NO: 1011 - DNA, 60 bp, Artificial Sequence
  source: /note="Description of Artificial Sequence: Synthetic oligonucleotide"
  source: /note="SR36"
tagaactgatgcaaaaagtgctcgacgaaggcacacagatgtgtaggctggagctgcttc

SEQ ID NO: 1012 - DNA, 60 bp, Artificial Sequence
  source: /note="Description of Artificial Sequence: Synthetic oligonucleotide"
  source: /note="SR38"
gtttcgtaattagatagccaccggcgctttaatgcccggacatatgaatatcctccttag

SEQ ID NO: 1013 - DNA, 52 bp, Artificial Sequence
  source: /note="Description of Artificial Sequence: Synthetic oligonucleotide"
  source: /note="SR33"
caacacgtttcctgaggaaccatgaaacagtatttagaactgatgcaaaaag

SEQ ID NO: 1014 - DNA, 36 bp, Artificial Sequence
  source: /note="Description of Artificial Sequence: Synthetic oligonucleotide"
  source: /note="SR43"
atatcgtcgcagcccacagcaacacgtttcctgagg

SEQ ID NO: 1015 - DNA, 47 bp, Artificial Sequence
  source: /note="Description of Artificial Sequence: Synthetic oligonucleotide"
  source: /note="SR44"
aagaatttaacggagggcaaaaaaaaccgacgcacactggcgtcggc

SEQ ID NO: 1016 - DNA, 967 bp, Artificial Sequence
  source: /note="Description of Artificial Sequence: Synthetic polynucleotide"
  source: /note="Wild-type clbA"
caaatatcacataatcttaacatatcaataaacacagtaaagtttcatgtgaaaaacatcaaacataaaatacaagctcggaatacgaatcacgctatacacattgctaacaggaatgagattatctaaatgaggattgatatattaattggacatactagtttttttcatcaaaccagtagagataacttccttcactatctcaatgaggaagaaataaaacgctatgatcagtttcattttgtgagtgataaagaactctatattttaagccgtatcctgctcaaaacagcactaaaaagatatcaacctgatgtctcattacaatcatggcaatttagtacgtgcaaatatggcaaaccatttatagtttttcctcagttggcaaaaaagattttttttaacctttcccatactatagatacagtagccgttgctattagttctcactgcgagcttggtgtcgatattgaacaaataagagatttagacaactcttatctgaatatcagtcagcatttttttactccacaggaagctactaacatagtttcacttcctcgttatgaaggtcaattacttttttggaaaatgtggacgctcaaagaagcttacatcaaatatcgaggtaaaggcctatctttaggactggattgtattgaatttcatttaacaaataaaaaactaacttcaaaatatagaggttcacctgtttatttctctcaatggaaaatatgtaactcatttctcgcattagcctctccactcatcacccctaaaataactattgagctatttcctatgcagtcccaactttatcaccacgactatcagctaattcattcgtcaaatgggcagaattgaatcgccacggataatctagacacttctgagccgtcgataatattgattttcatattccgtcggtggtgtaagtatcccgcataatcgtgccattcacatttag

SEQ ID NO: 1017 - DNA, 424 bp, Artificial Sequence
  source: /note="Description of Artificial Sequence: Synthetic polynucleotide"
  source: /note="clbA knockout"
ggatggggggaaacatggataagttcaaagaaaaaaacccgttatctctgcgtgaaagacaagtattgcgcatgctggcacaaggtgatgagtactctcaaatatcacataatcttaacatatcaataaacacagtaaagtttcatgtgaaaaacatcaaacataaaatacaagctcggaatacgaatcacgctatacacattgctaacaggaatgagattatctaaatgaggattgatgtgtaggctggagctgcttcgaagttcctatactttctagagaataggaacttcggaataggaacttcggaataggaactaaggaggatattcatatgtcgtcaaatgggcagaattgaatcgccacggataatctagacacttctgagccgtcgataatattgattttcatattccgtcggtgg

SEQ ID NO: 1018 - DNA, 28 bp, Artificial Sequence
  source: /note="Description of Artificial Sequence: Synthetic oligonucleotide"
  source: /note="Master Sequence"
  modified_base (13)..(15): a, c, g or t
  modified_base (18)..(20): a, c, g or t
tctagagaaagannngannnactagatg

SEQ ID NO: 1019 - DNA, 28 bp, Artificial Sequence
  source: /note="Description of Artificial Sequence: Synthetic oligonucleotide"
  source: /note="BBa_J61100"
tctagagaaagaggggacaaactagatg

SEQ ID NO: 1020 - DNA, 28 bp, Artificial Sequence
  source: /note="Description of Artificial Sequence: Synthetic oligonucleotide"
  source: /note="BBa_J61101"
tctagagaaagacaggacccactagatg

SEQ ID NO: 1021 - DNA, 28 bp, Artificial Sequence
  source: /note="Description of Artificial Sequence: Synthetic oligonucleotide"
  source: /note="BBa_J61102"
tctagagaaagatccgatgtactagatg

SEQ ID NO: 1022 - DNA, 28 bp, Artificial Sequence
  source: /note="Description of Artificial Sequence: Synthetic oligonucleotide"
  source: /note="BBa_J61103"
tctagagaaagattagacaaactagatg

SEQ ID NO: 1023 - DNA, 28 bp, Artificial Sequence
  source: /note="Description of Artificial Sequence: Synthetic oligonucleotide"
  source: /note="BBa_J61104"
tctagagaaagaagggacagactagatg

SEQ ID NO: 1024 - DNA, 28 bp, Artificial Sequence
  source: /note="Description of Artificial Sequence: Synthetic oligonucleotide"
  source: /note="BBa_J61105"
tctagagaaagacatgacgtactagatg

SEQ ID NO: 1025 - DNA, 28 bp, Artificial Sequence
  source: /note="Description of Artificial Sequence: Synthetic oligonucleotide"
  source: /note="BBa_J61106"
tctagagaaagataggagacactagatg

SEQ ID NO: 1026 - DNA, 28 bp, Artificial Sequence
  source: /note="Description of Artificial Sequence: Synthetic oligonucleotide"
  source: /note="BBa_J61107"
tctagagaaagaagagactcactagatg

SEQ ID NO: 1027 - DNA, 28 bp, Artificial Sequence
  source: /note="Description of Artificial Sequence: Synthetic oligonucleotide"
  source: /note="BBa_J61108"
tctagagaaagacgagatatactagatg

SEQ ID NO: 1028 - DNA, 28 bp, Artificial Sequence
  source: /note="Description of Artificial Sequence: Synthetic oligonucleotide"
  source: /note="BBa_J61109"
tctagagaaagactggagacactagatg

SEQ ID NO: 1029 - DNA, 28 bp, Artificial Sequence
  source: /note="Description of Artificial Sequence: Synthetic oligonucleotide"
  source: /note="BBa_J61110"
tctagagaaagaggcgaattactagatg

SEQ ID NO: 1030 - DNA, 28 bp, Artificial Sequence
  source: /note="Description of Artificial Sequence: Synthetic oligonucleotide"
  source: /note="BBa_J61111"
tctagagaaagaggcgatacactagatg

SEQ ID NO: 1031 - DNA, 28 bp, Artificial Sequence
  source: /note="Description of Artificial Sequence: Synthetic oligonucleotide"
  source: /note="BBa_J61112"
tctagagaaagaggtgacatactagatg

SEQ ID NO: 1032 - DNA, 28 bp, Artificial Sequence
  source: /note="Description of Artificial Sequence: Synthetic oligonucleotide"
  source: /note="BBa_J61113"
tctagagaaagagtggaaaaactagatg

SEQ ID NO: 1033 - DNA, 28 bp, Artificial Sequence
  source: /note="Description of Artificial Sequence: Synthetic oligonucleotide"
  source: /note="BBa_J61114"
tctagagaaagatgagaagaactagatg

SEQ ID NO: 1034 - DNA, 28 bp, Artificial Sequence
  source: /note="Description of Artificial Sequence: Synthetic oligonucleotide"
  source: /note="BBa_J61115"
tctagagaaagaagggatacactagatg

SEQ ID NO: 1035 - DNA, 28 bp, Artificial Sequence
  source: /note="Description of Artificial Sequence: Synthetic oligonucleotide"
  source: /note="BBa_J61116"
tctagagaaagacatgaggcactagatg

SEQ ID NO: 1036 - DNA, 28 bp, Artificial Sequence
  source: /note="Description of Artificial Sequence: Synthetic oligonucleotide"
  source: /note="BBa_J61117"
tctagagaaagacatgagttactagatg

SEQ ID NO: 1037 - DNA, 28 bp, Artificial Sequence
  source: /note="Description of Artificial Sequence: Synthetic oligonucleotide"
  source: /note="BBa_J61118"
tctagagaaagagacgaatcactagatg

SEQ ID NO: 1038 - DNA, 28 bp, Artificial Sequence
  source: /note="Description of Artificial Sequence: Synthetic oligonucleotide"
  source: /note="BBa_J61119"
tctagagaaagatttgatatactagatg

SEQ ID NO: 1039 - DNA, 28 bp, Artificial Sequence
  source: /note="Description of Artificial Sequence: Synthetic oligonucleotide"
  source: /note="BBa_J61120"
tctagagaaagacgcgagaaactagatg

SEQ ID NO: 1040 - DNA, 28 bp, Artificial Sequence
  source: /note="Description of Artificial Sequence: Synthetic oligonucleotide"
  source: /note="BBa_J61121"
tctagagaaagagacgagtcactagatg

SEQ ID NO: 1041 - DNA, 28 bp, Artificial Sequence
  source: /note="Description of Artificial Sequence: Synthetic oligonucleotide"
  source: /note="BBa_J61122"
tctagagaaagagaggagccactagatg

SEQ ID NO: 1042 - DNA, 28 bp, Artificial Sequence
  source: /note="Description of Artificial Sequence: Synthetic oligonucleotide"
  source: /note="BBa_J61123"
tctagagaaagagatgactaactagatg

SEQ ID NO: 1043 - DNA, 28 bp, Artificial Sequence
  source: /note="Description of Artificial Sequence: Synthetic oligonucleotide"
  source: /note="BBa_J61124"
tctagagaaagagccgacatactagatg

SEQ ID NO: 1044 - DNA, 28 bp, Artificial Sequence
  source: /note="Description of Artificial Sequence: Synthetic oligonucleotide"
  source: /note="BBa_J61125"
tctagagaaagagccgagttactagatg

SEQ ID NO: 1045 - DNA, 28 bp, Artificial Sequence
  source: /note="Description of Artificial Sequence: Synthetic oligonucleotide"
  source: /note="BBa_J61126"
tctagagaaagaggtgactcactagatg

SEQ ID NO: 1046 - DNA, 28 bp, Artificial Sequence
  source: /note="Description of Artificial Sequence: Synthetic oligonucleotide"
  source: /note="BBa_J61127"
tctagagaaagagtggaactactagatg

SEQ ID NO: 1047 - DNA, 28 bp, Artificial Sequence
  source: /note="Description of Artificial Sequence: Synthetic oligonucleotide"
  source: /note="BBa_J61128"
tctagagaaagataggactcactagatg

SEQ ID NO: 1048 - DNA, 28 bp, Artificial Sequence
  source: /note="Description of Artificial Sequence: Synthetic oligonucleotide"
  source: /note="BBa_J61129"
tctagagaaagattggacgtactagatg

SEQ ID NO: 1049 - DNA, 28 bp, Artificial Sequence
  source: /note="Description of Artificial Sequence: Synthetic oligonucleotide"
  source: /note="BBa_J61130"
tctagagaaagaaacgacatactagatg

SEQ ID NO: 1050 - DNA, 28 bp, Artificial Sequence
  source: /note="Description of Artificial Sequence: Synthetic oligonucleotide"
  source: /note="BBa_J61131"
tctagagaaagaaccgaattactagatg

SEQ ID NO: 1051 - protein, 26 aa, Artificial Sequence
  source: /note="Description of Artificial Sequence: Synthetic peptide"
  source: /note="polypeptide linker"
SSADDAKKDAAKKDDAKKDDAKKDAS

SEQ ID NO: 1052 - protein, 15 aa, Artificial Sequence
  source: /note="Description of Artificial Sequence: Synthetic peptide"
  source: /note="polypeptide linker"
GGGGSGGGGSGGGGS

SEQ ID NO: 1053 - protein, 197 aa, Artificial Sequence
  source: /note="Description of Artificial Sequence: Synthetic polypeptide"
RNLPVATPDPGMFPCLHHSQNLLRAVSNMLQKARQTLEFYPCTSEEIDHEDITKDKTSTVEACLPLELTKNESCLNSRETSFITNGSCLASRKTSFMMALCLSSIYEDLKMYQVEFKTMNAKLLMDPKRQIFLDQNMLAVIDELMQALNFNSETVPQKSSLEEPDFYKTKIKLCILLHAFRIRAVTIDRVMSYLNAS

SEQ ID NO: 1054 - protein, 306 aa, Artificial Sequence
  source: /note="Description of Artificial Sequence: Synthetic polypeptide"
IWELKKDVYVVELDWYPDAPGEMVVLTCDTPEEDGITWTLDQSSEVLGSGKTLTIQVKEFGDAGQYTCHKGGEVLSHSLLLLHKKEDGIWSTDILKDQKEPKNKTFLRCEAKNYSGRFTCWWLTTISTDLTFSVKSSRGSSDPQGVTCGAATLSAERVRGDNKEYEYSVECQEDSACPAAEESLPIEVMVDAVHKLKYENYTSSFFIRDIIKPDPPKNLQLKPLKNSRQVEVSWEYPDTWSTPHSYFSLTFCVQVQGKSKREKKDRVFTDKTSATVICRKNASISVRAQDRYYSSSWSEWASVPCS

SEQ ID NO: 1055 - protein, 197 aa, Artificial Sequence; identical to SEQ ID NO: 1053
  source: /note="Description of Artificial Sequence: Synthetic polypeptide"

SEQ ID NO: 1056 - protein, 313 aa, Artificial Sequence
  source: /note="Description of Artificial Sequence: Synthetic polypeptide"
MWELEKDVYVVEVDWTPDAPGETVNLTCDTPEEDDITWTSDQRHGVIGSGKTLTITVKEFLDAGQYTCHKGGETLSHSHLLLHKKENGIWSTEILKNFKNKTFLKCEAPNYSGRFTCSWLVQRNMDLKFNIKSSSSSPDSRAVTCGMASLSAEKVTLDQRDYEKYSVSCQEDVTCPTAEETLPIELALEARQQNKYENYSTSFFIRDIIKPDPPKNLQMKPLKNSQVEVSWEYPDSWSTPHSYFSLKFFVRIQRKKEKMKETEEGCNQKGAFLVEKTSTEVQCKGGNVCVQAQDRYYNSSCSKWACVPCRVRS

SEQ ID NO: 1057 - protein, 114 aa, Artificial Sequence
  source: /note="Description of Artificial Sequence: Synthetic polypeptide"
NWVNVISDLKKIEDLIQSMHIDATLYTESDVHPSCKVTAMKCFLLELQVISLESGDASIHDTVENLIILANNSLSSNGNVTESGCKECEELEEKNIKEFLQSFVHIVQMFINTS

SEQ ID NO: 1058 - protein, 127 aa, Artificial Sequence [sequence omitted]

SEQ ID NO: 1059 - protein, 177 aa, Artificial Sequence
  source: /note="Description of Artificial Sequence: Synthetic polypeptide"
GPQREEFPRDLSLISPLAQAVRSSSRTPSDKPVAHVVANPQAEGQLQWLNRRANALLANGVELRDNQLVVPSEGLYLIYSQVLFKGQGCPSTHVLLTHTISRIAVSYQTKVNLLSAIKSPCQRETPEGAEAKPWYEPIYLGGVFQLEKGDRLSAEINRPDYLDFAESGQVYFGIIAL

SEQ ID NO: 1060 - protein, 138 aa, Artificial Sequence
  source: /note="Description of Artificial Sequence: Synthetic polypeptide"
QDPYVKEAENLKKYFNAGHSDVADNGTLFLGILKNWKEESDRKIMQSQIVSFYFKLFKNFKDDQSIQKSVETIKEDMNVKFFNSNKKKRDDFEKLTNYSVTDLNVQRKAIHELIQVMAELSPAAKTGKRKRSQMLFRG

SEQ ID NO: 1061 - protein, 73 aa, Artificial Sequence
  source: /note="Description of Artificial Sequence: Synthetic polypeptide"
VPLSRTVRCTCISISNQPVNPRSLEKLEIIPASQFCPRVEIIATMKKKGEKRCLNPESKAIKNLLKAVSKERS

SEQ ID NO: 1062 - protein, 125 aa, Artificial Sequence
  source: /note="Description of Artificial Sequence: Synthetic polypeptide"
MKKSGVLFLLGIILLVLIGVQGTPVVRKGRCSCISTNQGTIHLQSLKDLKQFAPSPSCEKIEIIATLKNGVQTCLNPDSADVKELIKKWEKQVSQKKKQKNGKKHQKKKVLKVRKSQRSRQKKTT

SEQ ID NO: 1063 - DNA, 594 bp, Artificial Sequence
  source: /note="Description of Artificial Sequence: Synthetic polynucleotide"
aggaacctgcctgtggcaacaccagaccctgggatgttcccttgcttacatcattcccagaacctgttgcgtgcggtgtctaacatgctgcagaaagccaggcagacgctggaattctacccatgcacttccgaagagatagatcatgaagacattacgaaagacaaaacctcaacggttgaagcatgcttacctctggaattgactaagaatgaatcgtgcttaaactcaagagagaccagtttcatcactaatggctcttgcttagcgtcgcgcaagaccagcttcatgatggcgctctgcctaagtagcatctacgaggacctcaaaatgtaccaagttgaatttaaaactatgaatgccaaacttctaatggacccaaaaagacagatatttttagatcagaatatgcttgcggttattgacgaactcatgcaggcattgaattttaattccgagacggtgccacaaaaaagttctttggaggagccggacttttacaagacaaaaatcaagctgtgcatacttcttcacgcattcagaatacgggccgttacgatcgatcgcgtcatgtcgtatcttaatgcgagctga

SEQ ID NO: 1064 - DNA, 924 bp, Artificial Sequence
  source: /note="Description of Artificial Sequence: Synthetic polynucleotide"
atctgggaactgaaaaaagatgtttatgtagttgaactggattggtacccggatgcacccggtgagatggtggttttgacctgcgacacgccggaagaagatggcataacgtggaccctggatcaaagctctgaagttctgggttcaggtaagacattgacgatccaagtaaaagaatttggcgacgcaggtcagtacacctgccacaaaggtggcgaagttctgtcgcactcactcctgctcctgcacaaaaaagaggatggcatctggagtactgatatcctaaaggatcaaaaagaacctaaaaacaaaacgttcttgcgctgtgaagcgaagaactatagtggtcgctttacgtgctggtggttgactaccatttccaccgatttgaccttttctgttaagagttcgcgcggctcgtcagatccgcagggcgttacttgcggtgcggcgacgctgtcagctgagagagttcgtggggacaacaaagagtacgaatatagtgtagaatgtcaagaggattcggcgtgcccggcagcagaggagtctctccccattgaagttatggtggacgcagtgcataaactgaaatatgagaattacacatcaagcttttttattcgcgatatcatcaaaccggatcctccaaaaaatctgcaactaaagcccctgaaaaattcgcgccaagttgaggtgagctgggaatatccggatacttggtcgacaccgcattcttatttctcactgaccttctgcgttcaggttcaaggtaaatcaaaacgagaaaaaaaggatcgcgtctttaccgacaaaacgtctgctactgtaatctgccgcaagaatgcgtcaatttctgtacgtgcgcaagatcgctactactctagtagttggtctgaatgggcttcagtgccatgctcctgatga

SEQ ID NO: 1065 - DNA, 594 bp, Artificial Sequence
  source: /note="Description of Artificial Sequence: Synthetic polynucleotide"
cgtaaccttccggtggccacgccagatccgggcatgttcccgtgcttacaccattcccagaatctgctgcgcgctgtgagtaatatgctgcagaaggcgagacaaactttggaattttacccgtgcacttcggaggagattgaccatgaggatatcacaaaagacaaaaccagtacagtggaagcctgcctgccccttgaactgactaaaaatgagagttgtttaaattcacgcgaaaccagcttcattactaacggaagctgcttagcatcgcggaaaaccagttttatgatggccctttgcctttcatctatttacgaggaccttaaaatgtatcaagttgaatttaagactatgaacgcgaaactgctaatggatcccaagcgacaaatctttcttgatcaaaatatgttggctgttattgatgaactgatgcaagccctgaattttaactcagaaaccgtacctcagaaatcgagtttagaagaacccgatttctacaaaactaaaatcaagttgtgtatccttttacatgccttccggattcgggccgtcactattgatcgcgtgatgtcgtacttgaatgcctcctaa

SEQ ID NO: 1066 - DNA, 942 bp, Artificial Sequence
  source: /note="Description of Artificial Sequence: Synthetic polynucleotide"
atgtgggaattggaaaaagacgtgtatgttgttgaagttgactggactccggacgcgcctggtgaaactgttaatctgacttgtgatacaccggaggaagatgatataacttggactagcgatcaacgacacggcgtaatcggctctggtaagactttgaccattactgtgaaggaattcttggatgcggggcaatatacgtgtcataaaggcggcgagacgctgtcacactctcacctgttgttacataaaaaagagaatggtatatggtctacggagatcttgaaaaactttaaaaacaaaacttttttgaagtgtgaggctccaaactattctggtcgctttacctgtagttggttggtgcaacgtaacatggatctcaaatttaacataaagtcgtcttcgtcttctcccgatagccgagcggttacctgtggcatggctagtttgtcggcggagaaggtgaccttggatcaacgtgattatgaaaaatatagcgtttcgtgccaagaggacgttacgtgccctaccgctgaagagactttgccgattgaattggcactggaagcacgacaacaaaataaatacgagaattactcaactagtttcttcatccgagatatcataaaaccggaccccccgaagaatctgcaaatgaaaccgcttaaaaattcacaggtagaggtttcgtgggagtacccggatagttggtctacgcctcattcgtattttagcctgaaatttttcgttcgaatacagcgaaaaaaagagaagatgaaagaaactgaagaagggtgtaaccaaaaaggtgcatttctggtggagaaaactagcaccgaggttcaatgcaaaggcggtaacgtgtgcgtacaagctcaagaccgttattataacagtagctgttctaaatgggcttgcgtgccctgccgcgtgagatcatga

SEQ ID NO: 1067 - DNA, 345 bp, Artificial Sequence
  source: /note="Description of Artificial Sequence: Synthetic polynucleotide"
aattgggttaatgttatatctgatttgaaaaaaatagaggatctgattcaatcaatgcacatagatgcgactctgtatactgagagcgatgtgcacccgagttgcaaagttactgctatgaaatgttttctgctggagctgcaagttatctctctggagagtggtgatgcgtctattcacgatactgttgagaatctgattattctggctaataactcgctgtcaagtaatgggaatgttacggaatctggctgtaaggagtgtgaagaattagaagaaaaaaatattaaagagtttctgcagagttttgtgcacattgttcagatgtttatcaatactagctga

SEQ ID NO: 1068 - DNA, 384 bp, Artificial Sequence
  source: /note="Description of Artificial Sequence: Synthetic polynucleotide"
gcaccggcccgcagcccatcaccgtcaactcaaccttgggaacatgtaaatgctattcaagaagctcgccgcctgttgaatttgagtcgcgatactgcagcagagatgaatgagactgtagaggtgatttcagaaatgtttgacctgcaggagccgacttgtttgcaaactcgcctggagctgtacaaacaaggcctgcgtggctcgctgactaaactgaaaggtcctctgacgatgatggcttctcattataaacaacactgcccgcctactccggagacgtcttgcgcgacccagataattacttttgaatcttttaaagagaatctgaaagactttctgctggttatcccgtttgattgttgggaaccggttcaagaataa

SEQ ID NO: 1069 - DNA, 534 bp, Artificial Sequence
  source: /note="Description of Artificial Sequence: Synthetic polynucleotide"
ggtccgcagagggaagaattcccgcgcgatttgagcctgatttcacctcttgctcaggctgtccgctcctcttcgcgtaccccctcggataaacctgtcgcgcacgtggttgcgaacccgcaagcggaagggcagctgcaatggttaaaccgccgggctaatgcactgctggctaatggagttgagttacgcgacaaccaacttgtcgttccttcggaagggctgtatctgatctattcacaggttctctttaaagggcagggttgcccatcaacccacgtgctcctgacacacacgatcagtcgtatcgcggtatcctatcagacgaaagttaacctcctgtcagcgattaaatcgccgtgtcagagagaaactccagagggtgcggaagctaaaccgtggtatgaacctatttatcttggtggagttttccagttggaaaaaggtgatagactgtcggcagagatcaatcgccctgattacctggatttcgctgagtcgggtcaggtttatttcggaattattgcactgtga

SEQ ID NO: 1070 - DNA, 417 bp, Artificial Sequence
  source: /note="Description of Artificial Sequence: Synthetic polynucleotide"
caggatccttacgttaaagaagcagagaatctgaaaaaatactttaatgcaggccacagcgatgtggcagataatggcacgttattcctgggcattctgaaaaattggaaagaagaatctgaccggaagatcatgcaatctcagatcgtatcattttatttcaagttgtttaaaaacttcaaggatgaccagtcgattcaaaaatcagtggaaacgatcaaagaagatatgaacgttaagttcttcaactcaaataaaaaaaaacgcgatgatttcgaaaaactgactaattattcggtaactgatttgaatgttcagcgcaaggcgattcatgaattgattcaggttatggcagaactgtcgccagcggcaaaaacgggtaaacgaaaacgttctcagatgttgtttcgtggttga

SEQ ID NO: 1071 - DNA, 222 bp, Artificial Sequence
  source: /note="Description of Artificial Sequence: Synthetic polynucleotide"
gtgcccctgagccgcaccgtgcgttgtacgtgtatctccatctcaaaccagccggtaaacccgcgtagtttagaaaaactggagattatcccagccagccagttttgcccgcgcgttgagattattgcgaccatgaagaaaaaaggggaaaaacgttgccttaatccagaaagtaaggctatcaaaaacctgttgaaagctgtctcgaaagagcgttcctaa

SEQ ID NO: 1072 - protein, 95 aa, Artificial Sequence
  source: /note="Description of Artificial Sequence: Synthetic polypeptide"
MMKRNILAVIVPALLVAGTANAVPLSRTVRCTCISISNQPVNPRSLEKLEIIPASQFCPRVEIIATMKKKGEKRCLNPESKAIKNLLKAVSKERS

SEQ ID NO: 1073 - protein, 94 aa, Artificial Sequence
  source: /note="Description of Artificial Sequence: Synthetic polypeptide"
MKQSTIALALLPLLFTPVTKAVPLSRTVRCTCISISNQPVNPRSLEKLEIIPASQFCPRVEIIATMKKKGEKRCLNPESKAIKNLLKAVSKERS

SEQ ID NO: 1074 - protein, 112 aa, Artificial Sequence
  source: /note="Description of Artificial Sequence: Synthetic polypeptide"
MNNNDLFQASRRRFLAQLGGLTVAGMLGPSLLTPRRATAVPLSRTVRCTCISISNQPVNPRSLEKLEIIPASQFCPRVEIIATMKKKGEKRCLNPESKAIKNLLKAVSKERS

SEQ ID NO: 1075 - protein, 125 aa, Artificial Sequence
  source: /note="Description of Artificial Sequence: Synthetic polypeptide"
MMKRNILAVIVPALLVAGTANATPVVRKGRCSCISTNQGTIHLQSLKDLKQFAPSPSCEKIEIIATLKNGVQTCLNPDSADVKELIKKWEKQVSQKKKQKNGKKHQKKKVLKVRKSQRSRQKKTT

SEQ ID NO: 1076 - protein, 124 aa, Artificial Sequence
  source: /note="Description of Artificial Sequence: Synthetic polypeptide"
MKQSTIALALLPLLFTPVTKATPVVRKGRCSCISTNQGTIHLQSLKDLKQFAPSPSCEKIEIIATLKNGVQTCLNPDSADVKELIKKWEKQVSQKKKQKNGKKHQKKKVLKVRKSQRSRQKKTT

SEQ ID NO: 1077 - protein, 142 aa, Artificial Sequence
  source: /note="Description of Artificial Sequence: Synthetic polypeptide"
MNNNDLFQASRRRFLAQLGGLTVAGMLGPSLLTPRRATATPVVRKGRCSCISTNQGTIHLQSLKDLKQFAPSPSCEKIEIIATLKNGVQTCLNPDSADVKELIKKWEKQVSQKKKQKNGKKHQKKKVLKVRKSQRSRQKKTT

SEQ ID NO: 1078 - protein, 126 aa, Artificial Sequence
  source: /note="Description of Artificial Sequence: Synthetic polypeptide"
MKQSTIALALLPLLFTPVTKATLVIRNARCSCISTSRGTIHYKSLKDLKQFAPSPNCNKTEIIATLKNGDQTCLDPDSANVKKLMKEWEKKISQKKKQKRGKKHQKNMKNRKPKTPQSRRRSRKTT

SEQ ID NO: 1079 - protein, 127 aa, Artificial Sequence
  source: /note="Description of Artificial Sequence: Synthetic polypeptide"
MMKRNILAVIVPALLVAGTANATLVIRNARCSCISTSRGTIHYKSLKDLKQFAPSPNCNKTEIIATLKNGDQTCLDPDSANVKKLMKEWEKKISQKKKQKRGKKHQKNMKNRKPKTPQSRRRSRKTT

SEQ ID NO: 1080 - protein, 144 aa, Artificial Sequence
  source: /note="Description of Artificial Sequence: Synthetic polypeptide"
MNNNDLFQASRRRFLAQLGGLTVAGMLGPSLLTPRRATATLVIRNARCSCISTSRGTIHYKSLKDLKQFAPSPNCNKTEIIATLKNGDQTCLDPDSANVKKLMKEWEKKISQKKKQKRGKKHQKNMKNRKPKTPQSRRRSRKTT

SEQ ID NO: 1081 - DNA, 285 bp, Artificial Sequence
  source: /note="Description of Artificial Sequence: Synthetic polynucleotide"
atgaagcagagcaccatcgcgcttgccctgctgccgttgcttttcacgcctgtcaccaaggctgtgcccctgagccgcaccgtgcgttgtacgtgtatctccatctcaaaccagccggtaaacccgcgtagtttagaaaaactggagattatcccagccagccagttttgcccgcgcgttgagattattgcgaccatgaagaaaaaaggggaaaaacgttgccttaatccagaaagtaaggctatcaaaaacctgttgaaagctgtctcgaaagagcgttcctaa

SEQ ID NO: 1082 - DNA, 297 bp, Artificial Sequence
  source: /note="Description of Artificial Sequence: Synthetic polynucleotide"
atgaagcagagcaccatcgcgcttgccctgctgccgttgcttttcacgcctgtcaccaaggctatcccactggctcgcacagtccgctgtaattgcatccacatcgatgacggtcctgtgcgtatgcgtgcaatcggtaaacttgaaattatccctgcctccttatcgtgtccccgcgtagagattatcgccacgatgaagaaaaacgatgaacagcgttgtcttaacccagagagcaaaactatcaaaaacctgatgaaggcttttagtcaaaagcgcagtaagcgcgcaccataa

SEQ ID NO: 1083 - DNA, 375 bp, Artificial Sequence
  source: /note="Description of Artificial Sequence: Synthetic polynucleotide"
atgaagcagagcaccatcgcgcttgccctgctgccgttgcttttcacgcctgtcaccaaggctacacccgtagtgcgtaaagggcgctgcagttgcatctcgactaaccaggggacaatccacctgcagtcgctgaaagatttgaagcagtttgcaccgagccctagttgtgaaaaaatcgagatcatcgctacattaaagaacggcgtccaaacatgtcttaaccccgactcagcagatgttaaagaacttattaagaaatgggagaagcaggtaagtcagaaaaagaaacagaaaaatggcaagaaacatcagaaaaagaaagtcttaaaggttcgtaaatcgcagcgttctcgtcaaaagaagacgacgtaa

SEQ ID NO: 1084 - DNA, 381 bp, Artificial Sequence
  source: /note="Description of Artificial Sequence: Synthetic polynucleotide"
atgaagcagagcaccatcgcgcttgccctgctgccgttgcttttcacgcctgtcaccaaggctacgctggtgatccgtaacgcccgctgttcatgcatcagcacttctcgtggaaccatccactataaatcattaaaggacttgaaacagtttgcaccttcaccaaattgtaacaagacggaaattattgctactctgaaaaacggagatcaaacttgcctggaccccgactctgcaaacgtgaagaagctgatgaaggaatgggaaaaaaaaatctctcaaaagaaaaagcaaaagcgcggtaagaaacatcagaagaacatgaagaatcgtaagccaaagacccctcagtcgcgccgtcgttctcgtaagacgacgtaa

SEQ ID NO: 1085 - DNA, 284 bp, Artificial Sequence
  source: /note="Description of Artificial Sequence: Synthetic polynucleotide"
atgaagcagagcaccatcgcgcttgccctgctgccgttgcttttcacgcctgtcaccaaggctgtgcccctgagccgcaccgtgcgttgtacgtgtatctccatctcaaaccagccggtaaacccgcgtagtttagaaaaactggagattatcccagccagccagttttgcccgcgcgttgagattattgcgaccatgaagaaaaaaggggaaaaacgttgccttaatccagaaagtaaggctatcaaaaacctgttgaaagctgtctcgaaagagcgttccta

SEQ ID NO: 1086 - DNA, 1204 bp, Artificial Sequence
  source: /note="Description of Artificial Sequence: Synthetic polynucleotide"
ccaggatacatagattaccacaactccgagcccttccaccttaagacccactttcacatttaagttgtttttctaatccgcatatgatcaattcaaggccgaataagaaggctggctctgcaccttggtgatcaaataattcgatagcttgtcgtaataatggcggcatactatcagtagtaggtgtttccctttcttctttagcgacttgatgctcttgatcttccaatacgcaacctaaagtaaaatgccccacagcgctgagtgcatataatgcattctctagtgaaaaaccttgttggcataaaaaggctaattgattttcgagagtttcatactgtttttctgtaggccgtgtacctaaatgtacttttgctccatcgcgatgacttagtaaagcacatctaaaacttttagcgttattacgtaaaaaatcttgccagctttccccttctaaagggcaaaagtgagtatggtgcctatctaacatctcaatggctaaggcgtcgagcaaagcccgcttattttttacatgccaatacaatgtaggctgctctacacctagcttctgggcgagtttacgggttgttaaaccttcgattccgacctcattaagcagctctaatgcgctgttaatcactttacttttatctaatctagacatcattaattcctaatttttgttgacactctatcattgatagagttattttaccactccctatcagtgatagagaaaagtgaaataagtttatcaaaataaaaggaggtaatatatgaagcagagcaccatcgcgcttgccctgctgccgttgcttttcacgcctgtcaccaaggctatcccactggctcgcacagtccgctgtaattgcatccacatcgatgacggtcctgtgcgtatgcgtgcaatcggtaaacttgaaattatccctgcctccttatcgtgtccccgcgtagagattatcgccacgatgaagaaaaacgatgaacagcgttgtcttaacccagagagcaaaactatcaaaaacctgatgaaggcttttagtcaaaagcgcagtaagcgcgcaccataaaacgattggtaaacccggtgaacgcatgagaaagcccccggaagatcaccttccgggggcttttttattgcgcggaccaaaacgaaaaaagacgctcgaaagcgtctcttttctggaatttggtaccgagg

SEQ ID NO: 1087 - DNA, 375 bp, Artificial Sequence; identical to SEQ ID NO: 1083
  source: /note="Description of Artificial Sequence: Synthetic polynucleotide"

SEQ ID NO: 1088 - DNA, 1288 bp, Artificial Sequence
  source: /note="Description of Artificial Sequence: Synthetic polynucleotide"
ccaggatacatagattaccacaactccgagcccttccaccttaagacccactttcacatttaagttgtttttctaatccgcatatgatcaattcaaggccgaataagaaggctggctctgcaccttggtgatcaaataattcgatagcttgtcgtaataatggcggcatactatcagtagtaggtgtttccctttcttctttagcgacttgatgctcttgatcttccaatacgcaacctaaagtaaaatgccccacagcgctgagtgcatataatgcattctctagtgaaaaaccttgttggcataaaaaggctaattgattttcgagagtttcatactgtttttctgtaggccgtgtacctaaatgtacttttgctccatcgcgatgacttagtaaagcacatctaaaacttttagcgttattacgtaaaaaatcttgccagctttccccttctaaagggcaaaagtgagtatggtgcctatctaacatctcaatggctaaggcgtcgagcaaagcccgcttattttttacatgccaatacaatgtaggctgctctacacctagcttctgggcgagtttacgggttgttaaaccttcgattccgacctcattaagcagctctaatgcgctgttaatcactttacttttatctaatctagacatcattaattcctaatttttgttgacactctatcattgatagagttattttaccactccctatcagtgatagagaaaagtgaaataagtttatcaaaataaaaggaggtaatatatgaagcagagcaccatcgcgcttgccctgctgccgttgcttttcacgcctgtcaccaaggctacgctggtgatccgtaacgcccgctgttcatgcatcagcacttctcgtggaaccatccactataaatcattaaaggacttgaaacagtttgcaccttcaccaaattgtaacaagacggaaattattgctactctgaaaaacggagatcaaacttgcctggaccccgactctgcaaacgtgaagaagctgatgaaggaatgggaaaaaaaaatctctcaaaagaaaaagcaaaagcgcggtaagaaacatcagaagaacatgaagaatcgtaagccaaagacccctcagtcgcgccgtcgttctcgtaagacgacgtaaaacgattggtaaacccggtgaacgcatgagaaagcccccggaagatcaccttccgggggcttttttattgcgcggaccaaaacgaaaaaagacgctcgaaagcgtctcttttctggaatttggtaccgagg

SEQ ID NO: 1089 - DNA, 858 bp, Artificial Sequence
  source: /note="Description of Artificial Sequence: Synthetic polynucleotide"
aaacaatcgaccatcgcattggcgctgcttcctctattgttcacaccggtgacaaaggcagtcgactataaggatgacgacgacaagcaattgggcggtggccaccgtcgtttggacaaggtggaggaggaagtcaacttgcatgaagattttgtatttatcaagaaattaaagcgttgtaacaagggtgaagggagcttgagtttacttaactgtgaagaaatgcgccgccaattcgaggacttggttaaggacattacccttaacaaggaagaaaagaaagagaacagcttcgaaatgcagcgtggcgatgaagacccccagatcgcggcacatgtcgtttccgaggcaaattcgaatgctgcttcagtcttacaatgggcgaaaaagggctactacacgatgaagtcaaacttagtgatgcttgaaaatggcaagcaattaaccgtgaagcgcgaaggattgtattatgtctacacccaagtaacattttgctccaatcgcgaaccgtcgtcgcagcgccctttcatcgttggtttgtggttgaagccgagctccggttccgagcgtattcttttgaaagccgcaaacacccacagcagctcgcagctgtgtgaacagcagagcgtccacctgggcggcgtatttgaattgcaagcgggagcgtcagttttcgttaatgtgactgaggcttctcaagttatccatcgtgtcggtttctccagcttcggcttactgaagttaaagggcgagctcaattcgaagcttgaaggtaagcctatccctaaccctctcctcggcctcgattctacggatccgaattcgagctccgtcgaccatcaccatcaccaccactga

SEQ ID NO: 1090 - DNA, 791 bp, Artificial Sequence
  source: /note="Description of Artificial Sequence: Synthetic polynucleotide"
tgactagtaaacaatcgaccatcgcattggcgctgcttcctctattgttcacaccggtgacaaaggcagtcgactataaggatgacgacgacaagcaattgggcggtggcatgcaacgtggcgatgaggacccgcaaattgccgcgcatgttgtgtccgaagcgaactccaatgccgcatccgtcctgcaatgggctaagaaaggctattacacgatgaaatcaaacctggttatgcttgagaacggaaagcagcttacagtcaagcgtgagggcctgtattacgtctacacccaagttaccttttgctctaaccgtgagcccagcagccaacgcccttttattgtaggcctgtggttaaagccctcgtcgggttctgaacgcattcttctgaaagctgcgaatacgcactctagtagccagctgtgtgagcaacaatctgtccatcttggtggagtttttgagttacaagctggagcatctgtgttcgtgaatgtaacggaagcatctcaagttatccaccgtgtaggcttctcatcttttggtttattaaaattaaagggcgagctcaattcgaagcttgaaggtaagcctatccctaaccctctcctcggcctcgattctacggatccgaattcgagctccgtcgaccatcaccatcaccaccactgagcatgctaatcagccgtggaattcggtctcaggaggatcagttctggaccagcgagctgtgctgcgactcgtggcgtaatcatggtcatagctgtttcctgtgtgaaattgttatccgct

SEQ ID NO: 1091 - protein, 288 aa, Artificial Sequence
  source: /note="Description of Artificial Sequence: Synthetic polypeptide"
MTSKQSTIALALLPLLFTPVTKAVDYKDDDDKQLGGGHRRLDKVEEEVNLHEDFVFIKKLKRCNKGEGSLSLLNCEEMRRQFEDLVKDITLNKEEKKENSFEMQRGDEDPQIAAHVVSEANSNAASVLQWAKKGYYTMKSNLVMLENGKQLTVKREGLYYVYTQVTFCSNREPSSQRPFIVGLWLKPSSGSERILLKAANTHSSSQLCEQQSVHLGGVFELQAGASVFVNVTEASQVIHRVGFSSFGLLKLKGELNSKLEGKPIPNPLLGLDSTDPNSSSVDHHHHHH

SEQ ID NO: 1092 - protein, 223 aa, Artificial Sequence
  source: /note="Description of Artificial Sequence: Synthetic polypeptide"
MTSKQSTIALALLPLLFTPVTKAVDYKDDDDKQLGGGMQRGDEDPQIAAHVVSEANSNAASVLQWAKKGYYTMKSNLVMLENGKQLTVKREGLYYVYTQVTFCSNREPSSQRPFIVGLWLKPSSGSERILLKAANTHSSSQLCEQQSVHLGGVFELQAGASVFVNVTEASQVIHRVGFSSFGLLKLKGELNSKLEGKPIPNPLLGLDSTDPNSSSVDHHHHHH

SEQ ID NO: 1093 - protein, 215 aa, Artificial Sequence
  source: /note="Description of Artificial Sequence: Synthetic polypeptide"
HRRLDKIEDERNLHEDFVFMKTIQRCNTGERSLSLLNCEEIKSQFEGFVKDIMLNKEETKKENSFEMQKGDQNPQIAAHVISEASSKTTSVLQWAEKGYYTMSNNLVTLENGKQLTVKRQGLYYIYAQVTFCSNREASSQAPFIASLCLKSPGRFERILLRAANTHSSAKPCGQQSIHLGGVFELQPGASVFVNVTDPSQVSHGTGFTSFGLLKL

SEQ ID NO: 1094 - DNA, 1251 bp, Artificial Sequence
  source: /note="Description of Artificial Sequence: Synthetic polynucleotide"
atgactagtaaacaatcgaccatcgcattggcgctgcttcctctattgttcacaccggtgacaaaggcagtcgactataaggatgacgacgacaagcaattgggcggtggcaaggaactgaaagtcacccagcctgagaagtctgtctcagtagcggcaggtgacagcacggtgcttaactgcacgcttacttcactgctgccggtaggtcccattaaatggtatcgtggcgtgggccaaagtcgtttgttaatctactcctttacgggtgagcactttccgcgcgtaactaatgtaagcgacgcaacaaaacgtaacaacatggatttcagcattcgcatctcaaacgtcactcccgaggatgctgggacttactactgcgtaaaatttcagaaaggcccctcagagcccgatacagaaatccaatcaggaggcggcacagaagtctacgttctggcaaaaccctctccccctgaagtctccggtccagcagatcgtggcattcctgaccaaaaagtaaatttcacgtgcaaatcgcacgggtttagcccacgcaacatcacactgaagtggtttaaagatggtcaggaacttcatcaccttgagactaccgtgaacccgtccggtaaaaacgtttcctacaatatctcgtccactgtgcgtgttgtattgaatagcatggacgttcacagcaaggtgatctgtgaagtcgctcacattacccttgaccgttcaccattgcgtggtatcgcgaacctgagcaatttcatccgtgtcagcccgacggttaaggttactcagcagtccccaacatcgatgaaccaggtaaatctgacgtgtcgtgcagaacgtttttaccctgaagacctgcagttgatttggctggagaacgggaacgtctcgcgcaatgacacacccaaaaatctgacaaagaatactgacggtacgtacaattatacatcactgtttcttgtgaactcctccgcccatcgcgaggacgtagtctttacatgtcaagtcaagcacgatcagcagcccgcgatcacccgtaatcacacagttctgggcctggctcactcatccgatcagggatcaatgcaaacatttccgggaaacaatgcaacccacaactggaataagggcgagctcaattcgaagcttgaaggtaagcctatccctaaccctctcctcggcctcgattctacggatccgaattcgagctccgtcgaccatcaccatcaccaccactga

SEQ ID NO: 1095 - DNA, 564 bp, Artificial Sequence
  source: /note="Description of Artificial Sequence: Synthetic polynucleotide"
atgactagtaaacaatcgaccatcgcattggcgctgcttcctctattgttcacaccggtgacaaaggcagtcgactataaggatgacgacgacaagcaattgggtggtagcgaagaagaactgcagattatccaaccggacaaatctgttctggtggctgcgggtgaaacggctactttgcgctgcacaatcacctcgctgtttccagtcggaccaatccaatggttccgtggtgcgggaccgggtcgcgtgttgatctacaatcagcgtcaaggccctttcccccgtgttactactgtctccgatacaacaaagcgcaacaacatggacttttccatccgtatcgggaatatcacaccggccgacgcgggaacctattattgcatcaagtttcgcaagggatctccagacgatgttgaatttaagagcggggctggaactgagctgtccgtgcgtgcaaaaccttcgggcagcggcgagctcggtggcagtggtaagcctatccctaaccctctcctcggcctcgattctacgggatccggtcatcatcaccatcaccattga

SEQ ID NO: 1096 - DNA, 357 bp, Artificial Sequence
  source: /note="Description of Artificial Sequence: Synthetic polynucleotide"
gaagaagaactgcagattatccaaccggacaaatctgttctggtggctgcgggtgaaacggctactttgcgctgcacaatcacctcgctgtttccagtcggaccaatccaatggttccgtggtgcgggaccgggtcgcgtgttgatctacaatcagcgtcaaggccctttcccccgtgttactactgtctccgatacaacaaagcgcaacaacatggacttttccatccgtatcgggaatatcacaccggccgacgcgggaacctattattgcatcaagtttcgcaagggatctccagacgatgttgaatttaagagcggggctggaactgagctgtccgtgcgtgcaaaaccttcg

SEQ ID NO: 1097 - DNA, 945 bp, Artificial Sequence
  source: /note="Description of Artificial Sequence: Synthetic polynucleotide"
atgactagtaaacaatcgaccatcgcattggcgctgcttcctctattgttcacaccggtgacaaaggcagtcgactataaggatgacgacgacaagcaattgggtggtagcgaggaggaagtgcaaatcattcaacccgacaaaagcgttagtgtcgcggcgggtgagtccgccatcctgcattgcactatcacatccctgtttcccgtaggtcccattcaatggtttcgtggagccggtccggcgcgtgttcttatctacaatcaacgccagggacccttcccgcgtgttacaacgatcagtgaaactacccgtcgtgaaaacatggactttagcatttcgatctccaacattacacccgctgacgcagggacgtactactgcatcaagtttcgtaaaggatctccagacactgagtttaagtctggcgcagggacggagttgtccgtgcgtgcgaaaccttctggcggaggagggtcggggggcggtggttctgaagaggaagttcagattatccaaccagataaatcagtgtccgtggcggcgggagagtcagctatccttcactgtacaatcacatcgttattccctgtagggccaattcagtggttccgtggggcaggacccgcacgtgtccttatctataatcagcgtcaggggcccttcccacgtgttacgacaatttcagagactactcgccgcgagaacatggacttcagtattagcatctcgaacattaccccggcggacgcgggaacttattactgtatcaagtttcgtaaaggctcgccggacaccgagttcaaatccggggcaggcactgagttgagcgtgcgtgcgaaaccatcgggcagcggcgagctcggtggcagtggtaagcctatccctaaccctctcctcggcctcgattctacgggatccggtcatcatcaccatcaccattga

SEQ ID NO: 1098 - DNA, 1224 bp, Artificial Sequence
  source: /note="Description of Artificial Sequence: Synthetic polynucleotide"
atgactagtaaacaatcgaccatcgcattggcgctgcttcctctattgttcacaccggtgacaaaggcacaattgggtggtagcgaggaggagttacaaattatccaaccagataagtctgtcttggtcgcagccggagaaacggcgacgttacgctgcacaatcacctcactgttcccggtcggtccgattcagtggttccgtggagctggtccgggccgtgtcttaatttacaatcaacgtcaaggaccttttccacgcgtaacaactgtttctgacacaaccaaacgtaacaatatggacttttctattcgtattggcaacattacgccagccgatgcaggtacatactactgtatcaaattccgtaaaggtagtcctgatgacgttgagtttaaaagcggcgcagggacggagctttcagtgcgtgcaaagcccagtgctagcgcggcggcgccgccatgcccgccatgccctgcgcccgagttcttgggtgggccttcagtgttcctttttcccccgaaaccaaaagataccctgatgatttcgcgcacccctgaagttacttgtgtggttgttgacgtctcacaagaggacccagaggtacaattcaactggtatgtggacggagtagaggtgcataacgccaagactaagccccgtgaagagcagttcaattctacataccgtgtagtttcggttttaacggtcttacaccaagattggttgaacggaaaggaatataagtgcaaggtgtccaataagggactgccaagcagtatcgaaaaaacaatctcaaaagcaaagggacaaccgcgtgagccccaggtttacactctgccaccgtcgcaagaggagatgacgaagaatcaggtgtcgttaacctgtttggtcaaaggcttttatccaagcgatatcgcagtggaatgggaatcaaatgggcagcctgaaaataactataagacaaccccgcctgtacttgattctgatggatctttttttctttatagtcgcttaaccgtggataaatcccgttggcaggaaggtaatgtcttctcatgctcggttatgcacgaggcccttcataaccattacactcagaagagcctttctctgagtccggggaaaggcagcggcgagctcggtggcagtggtaagcctatccctaaccctctcctcggcctcgattctacgggatccggtcatcatcaccatcaccattga

SEQ ID NO: 1099 - DNA, 1128 bp, Artificial Sequence
  source: /note="Description of Artificial Sequence: Synthetic polynucleotide"
atgactagtaaacaatcgaccatcgcattggcgctgcttcctctattgttcacaccggtgacaaaggcacaattgggtggtagcgaggaggagttacaaattatccaaccagataagtctgtcttggtcgcagccggagaaacggcgacgttacgctgcacaatcacctcactgttcccggtcggtccgattcagtggttccgtggagctggtccgggccgtgtcttaatttacaatcaacgtcaaggaccttttccacgcgtaacaactgtttctgacacaaccaaacgtaacaatatggacttttctattcgtattggcaacattacgccagccgatgcaggtacatactactgtatcaaattccgtaaaggtagtcctgatgacgttgagtttaaaagcggcgcagggacggagctttcagtgcgtgcaaagcccagtgctagcgcggcggcgccgccatgcccgccatgccctgcgcccgagttcttgggtgggccttcagtgttcctttttcccccgaaaccaaaagataccctgatgatttcgcgcacccctgaagttacttgtgtggttgttgacgtctcacaagaggacccagaggtacaattcaactggtatgtggacggagtagaggtgcataacgccaagactaagccccgtgaagagcagttcaattctacataccgtgtagtttcggttttaacggtcttacaccaagattggttgaacggaaaggaatataagtgcaaggtgtccaataagggactgccaagcagtatcgaaaaaacaatctcaaaagcaaagggacaaccgcgtgagccccaggtttacactctgccaccgtcgcaagaggagatgacgaagaatcaggtgtcgttaacctgtttggtcaaaggcttttatccaagcgatatcgcagtggaatgggaatcaaatgggcagcctgaaaataactataagacaaccccgcctgtacttgattctgatggatctttttttctttatagtcgcttaaccgtggataaatcccgttggcaggaaggtaatgtcttctcatgctcggttatgcacgaggcccttcataaccattacactcagaagagcctttctctgagtccggggaaa

SEQ ID NO: 1100 - DNA, 1128 bp, Artificial Sequence; identical to SEQ ID NO: 1099
  source: /note="Description of Artificial Sequence: Synthetic polynucleotide"

SEQ ID NO: 1101 - DNA, 1191 bp, Artificial Sequence
  source: /note="Description of Artificial Sequence: Synthetic polynucleotide"
atgactagtaaacaatcgaccatcgcattggcgctgcttcctctattgttcacaccggtgacaaaggcacaattgggtggtagcgaagaagaggtgcagatcatccaacccgataaatcggtatctgtcgcagctggggagtcggcgattttgcattgcaccattacatctttgttccctgttgggcctattcaatggtttcgcggggcaggtccggcccgcgtattgatttataaccagcgtcaaggaccgttcccccgtgttacaactatttcggaaacaacacgtcgtgaaaatatggatttctcgatctctatctctaacattactcccgccgatgcagggacttattattgcattaaatttcgcaaaggaagccccgacacggagtttaagagtggagcgggcacggaattatcggtgcgcgcgaaacccagtgctagcgcggcggcgccgccatgcccgccatgccctgcgcccgagttcttgggtgggccttcagtgttcctttttcccccgaaaccaaaagataccctgatgatttcgcgcacccctgaagttacttgtgtggttgttgacgtctcacaagaggacccagaggtacaattcaactggtatgtggacggagtagaggtgcataacgccaagactaagccccgtgaagagcagttcaattctacataccgtgtagtttcggttttaacggtcttacaccaagattggttgaacggaaaggaatataagtgcaaggtgtccaataagggactgccaagcagtatcgaaaaaacaatctcaaaagcaaagggacaaccgcgtgagccccaggtttacactctgccaccgtcgcaagaggagatgacgaagaatcaggtgtcgttaacctgtttggtcaaaggcttttatccaagcgatatcgcagtggaatgggaatcaaatgggcagcctgaaaataactataagacaaccccgcctgtacttgattctgatggatctttttttctttatagtcgcttaaccgtggataaatcccgttggcaggaaggtaatgtcttctcatgctcggttatgcacgaggcccttcataaccattacactcagaagagcctttctctgagtccggggaaaggcagcggcgagctcggtggcagtggtaagcctatccctaaccctctcctcggcctcgattctacg

SEQ ID NO: 1102 - DNA, 1041 bp, Artificial Sequence
  source: /note="Description of Artificial Sequence: Synthetic polynucleotide"
gaagaagaggtgcagatcatccaacccgataaatcggtatctgtcgcagctggggagtcggcgattttgcattgcaccattacatctttgttccctgttgggcctattcaatggtttcgcggggcaggtccggcccgcgtattgatttataaccagcgtcaaggaccgttcccccgtgttacaactatttcggaaacaacacgtcgtgaaaatatggatttctcgatctctatctctaacattactcccgccgatgcagggacttattattgcattaaatttcgcaaaggaagccccgacacggagtttaagagtggagcgggcacggaattatcggtgcgcgcgaaacccagtgctagcgcggcggcgccgccatgcccgccatgccctgcgcccgagttcttgggtgggccttcagtgttcctttttcccccgaaaccaaaagataccctgatgatttcgcgcacccctgaagttacttgtgtggttgttgacgtctcacaagaggacccagaggtacaattcaactggtatgtggacggagtagaggtgcataacgccaagactaagccccgtgaagagcagttcaattctacataccgtgtagtttcggttttaacggtcttacaccaagattggttgaacggaaaggaatataagtgcaaggtgtccaataagggactgccaagcagtatcgaaaaaacaatctcaaaagcaaagggacaaccgcgtgagccccaggtttacactctgccaccgtcgcaagaggagatgacgaagaatcaggtgtcgttaacctgtttggtcaaaggcttttatccaagcgatatcgcagtggaatgggaatcaaatgggcagcctgaaaataactataagacaaccccgcctgtacttgattctgatggatctttttttctttatagtcgcttaaccgtggataaatcccgttggcaggaaggtaatgtcttctcatgctcggttatgcacgaggcccttcataaccattacactcagaagagcctttctctgagtccggggaaa

SEQ ID NO: 1103 - DNA, 681 bp, Homo sapiens
gcggcggcgccgccatgcccgccatgccctgcgcccgagttcttgggtgggccttcagtgttcctttttcccccgaaaccaaaagataccctgatgatttcgcgcacccctgaagttacttgtgtggttgttgacgtctcacaagaggacccagaggtacaattcaactggtatgtggacggagtagaggtgcataacgccaagactaagccccgtgaagagcagttcaattctacataccgtgtagtttcggttttaacggtcttacaccaagattggttgaacggaaaggaatataagtgcaaggtgtccaataagggactgccaagcagtatcgaaaaaacaatctcaaaagcaaagggacaaccgcgtgagccccaggtttacactctgccaccgtcgcaagaggagatgacgaagaatcaggtgtcgttaacctgtttggtcaaaggcttttatccaagcgatatcgcagtggaatgggaatcaaatgggcagcctgaaaataactataagacaaccccgcctgtacttgattctgatggatctttttttctttatagtcgcttaaccgtggataaatcccgttggcaggaaggtaatgtcttctcatgctcggttatgcacgaggcccttcataaccattacactcagaagagcctttctctgagtccggggaaa

SEQ ID NO: 1104 - DNA, 929 bp, Artificial Sequence
  source: /note="Description of Artificial Sequence: Synthetic polynucleotide"
atgactagtaaacaatcgaccatcgcattggcgctgcttcctctattgttcacaccggtgacaaaggcacaattgggtggtagccaggttaagttgcttcagtccggtgccgcattagtgaagcctggagcaagtgtcaagatgtcgtgtcaggcaagcgggtacagcttcaccgattattgggtgacgtgggttaaacaatcccacggacaatcattggaatggatcggggaaatctaccccagtaacactgtgacaaattttaacgacaattttaaagggaaggcaacccttacggtggataagtctacttccacagcgtatatggagctgagtcgcctgacttctgaggactctgccatctattactgtacacgtatcgggaacagtgggtatcgtgtagggtggttcatctactgggggcaaggtacccttgtgacagttttatccgggggtggcgggtcgggaggggggggatcaggcggtggagggtcggatacagttctgacccagtctccggcattggcggtgtcaccgggggagcgtgtcacgatcagttgtaaggcatcggaatccgtgtcgagccacatgcactggtaccagcagaaaccggggcagcagcctaaactgttgatttacaaggcatcaaatttagcctctggtgtacccgctcgttttagtggcagtggctcgggaacggacttcactttaacgattgaccctgttgaggcagacgataccgccacttacttctgccagcagggttggaacggcccattcacttttggggccgggacccgtctggaactgaagcgcgcggacgccgctggcagcggcgagctcggtggcagtggtaagcctatccctaaccctctcctcggcctcgattctacgggatccggtcatcaccaccatcaccatcaccattg

SEQ ID NO: 1105 - protein, 415 aa, Artificial Sequence
  source: /note="Description of Artificial Sequence: Synthetic polypeptide"
MTSKQSTIALALLPLLFTPVTKAVDYKDDDDKQLGGGKELKVTQPEKSVSVAAGDSTVLNCTLTSLLPVGPIKWYRGVGQSRLLIYSFTGEHFPRVTNVSDATKRNNMDFSIRISNVTPEDAGTYYCVKFQKGPSEPDTEIQSGGGTEVYVLAKPSPPEVSGPADRGIPDQKVNFTCKSHGFSPRNITLKWFKDGQELHHLETTVNPSGKNVSYNISSTVRVVLNSMDVHSKVICEVAHITLDRSPLRGIANLSNFIRVSPTVKVTQQSPTSMNQVNLTCRAERFYPEDLQLIWLENGNVSRNDTPKNLTKNTDGTYNYTSLFLVNSSAHREDVVFTCQVKHDQQPAITRNHTVLGLAHSSDQGSMQTFPGNNATHNWNKGELNSKEGKPIPNPLLGLDSTDPNSSSVDHHHHHH

SEQ ID NO: 1106 - protein, 187 aa, Artificial Sequence
  source: /note="Description of Artificial Sequence: Synthetic polypeptide"
MTSKQSTIALALLPLLFTPVTKAVDYKDDDDKQLGGSEEELQIIQPDKSVLVAAGETATLRCTITSLFPVGPIQWFRGAGPGRVLIYNQRQGPFPRVTTVSDTTKRNNMDFSIRIGNITPADAGTYYCIKFRKGSPDDVEFKSGAGTELSVRAKPSGSGELGGSGKPIPNPLLGLDSTGSGHHHHHH

SEQ ID NO: 1107 - protein, 119 aa, Artificial Sequence
  source: /note="Description of Artificial Sequence: Synthetic polypeptide"
EEELQIIQPDKSVLVAAGETATLRCTITSLFPVGPIQWFRGAGPGRVLIYNQRQGPFPRVTTVSDTTKRNNMDFSIRIGNITPADAGTYYCIKFRKGSPDDVEFKSGAGTELSVRAKPS

SEQ ID NO: 1108 - protein, 314 aa, Artificial Sequence
  source: /note="Description of Artificial Sequence: Synthetic polypeptide"
MTSKQSTIALALLPLLFTPVTKAVDYKDDDDKQLGGSEEEVQIIQPDKSVSVAAGESAILHCTITSLFPVGPIQWFRGAGPARVLIYNQRQGPFPRVTTISETTRRENMDFSISISNITPADAGTYYCIKFRKGSPDTEFKSGAGTELSVRAKPSGGGGSGGGGSEEEVQIIQPDKSVSVAAGESAILHCTITSLFPVGPIQWFRGAGPARVLIYNQRQGPFPRVTTISETTRRENMDFSISISNITPADAGTYYCIKFRKGSPDTEFKSGAGTELSVRAKPSGSGELGGSGKPIPNPLLGLDSTGSGHHHHHH

SEQ ID NO: 1109 - protein, 246 aa, Artificial Sequence
  source: /note="Description of Artificial Sequence: Synthetic polypeptide"
EEEVQIIQPDKSVSVAAGESAILHCTITSLFPVGPIQWFRGAGPARVLIYNQRQGPFPRVTTISETTRRENMDFSISISNITPADAGTYYCIKFRKGSPDTEFKSGAGTELSVRAKPSGGGGSGGGGSEEEVQIIQPDKSVSVAAGESAILHCTITSLFPVGPIQWFRGAGPARVLIYNQRQGPFPRVTTISETTRRENMDFSISISNITPADAGTYYCIKFRKGSPDTEFKSGAGTELSVRAKPS

SEQ ID NO: 1110 - protein, 416 aa, Artificial Sequence
  source: /note="Description of Artificial Sequence: Synthetic polypeptide"
MTSKQSTIALALLPLLFTPVTKAVDYKDDDDKQLGGSEEELQIIQPDKSVLVAAGETATLRCTITSLFPVGPIQWFRGAGPGRVLIYNQRQGPFPRVTTVSDTTKRNNMDFSIRIGNITPADAGTYYCIKFRKGSPDDVEFKSGAGTELSVRAKPSASAAAPPCPPCPAPEFLGGPSVFLFPPKPKDTLMISRTPEVTCVVVDVSQEDPEVQFNWYVDGVEVHNAKTKPREEQFNSTYRVVSVLTVLHQDWLNGKEYKCKVSNKGLPSSIEKTISKAKGQPREPQVYTLPPSQEEMTKNQVSLTCLVKGFYPSDIAVEWESNGQPENNYKTTPPVLDSDGSFFLYSRLTVDKSRWQEGNVFSCSVMHEALHNHYTQKSLSLSPGKGSGELGGSGKPIPNPLLGLDSTGSGHHHHHH

SEQ ID NO: 1111 - protein, 385 aa, Artificial Sequence
  source: /note="Description of Artificial Sequence: Synthetic polypeptide"
MTSKQSTIALALLPLLFTPVTKAVDYKDDDDKQLGGSEEELQIIQPDKSVLVAAGETATLRCTITSLFPVGPIQWFRGAGPGRVLIYNQRQGPFPRVTTVSDTTKRNNMDFSIRIGNITPADAGTYYCIKFRKGSPDDVEFKSGAGTELSVRAKPSASAAAPPCPPCPAPEFLGGPSVFLFPPKPKDTLMISRTPEVTCVVVDVSQEDPEVQFNWYVDGVEVHNAKTKPREEQFNSTYRVVSVLTVLHQDWLNGKEYKCKVSNKGLPSSIEKTISKAKGQPREPQVYTLPPSQEEMTKNQVSLTCLVKGFYPSDIAVEWESNGQPENNYKTTPPVLDSDGSFFLYSRLTVDKSRWQEGNVFSCSVMHEALHNHYTQKSLSLSPGK

SEQ ID NO: 1112 - protein, 348 aa, Artificial Sequence
  source: /note="Description of Artificial Sequence: Synthetic polypeptide"
EEELQIIQPDKSVLVAAGETATLRCTITSLFPVGPIQWFRGAGPGRVLIYNQRQGPFPRVTTVSDTTKRNNMDFSIRIGNITPADAGTYYCIKFRKGSPDDVEFKSGAGTELSVRAKPSASAAAPPCPPCPAPEFLGGPSVFLFPPKPKDTLMISRTPEVTCVVVDVSQEDPEVQFNWYVDGVEVHNAKTKPREEQFNSTYRVVSVLTVLHQDWLNGKEYKCKVSNKGLPSSIEKTISKAKGQPREPQVYTLPPSQEEMTKNQVSLTCLVKGFYPSDIAVEWESNGQPENNYKTTPPVLDSDGSFFLYSRLTVDKSRWQEGNVFSCSVMHEALHNHYTQKSLSLSPGK

SEQ ID NO: 1113 - protein, 407 aa, Artificial Sequence
  source: /note="Description of Artificial Sequence: Synthetic polypeptide"
MTSKQSTIALALLPLLFTPVTKAQLGGSEEEVQIIQPDKSVSVAAGESAILHCTITSLFPVGPIQWFRGAGPARVLIYNQRQGPFPRVTTISETTRRENMDFSISISNITPADAGTYYCIKFRKGSPDTEFKSGAGTELSVRAKPSASAAAPPCPPCPAPEFLGGPSVFLFPPKPKDTLMISRTPEVTCVVVDVSQEDPEVQFNWYVDGVEVHNAKTKPREEQFNSTYRVVSVLTVLHQDWLNGKEYKCKVSNKGLPSSIEKTISKAKGQPREPQVYTLPPSQEEMTKNQVSLTCLVKGFYPSDIAVEWESNGQPENNYKTTPPVLDSDGSFFLYSRLTVDKSRWQEGNVFSCSVMHEALHNHYTQKSLSLSPGKGSGELGGSGGKPIPNPLLGLDSTGSGHHHHHH

SEQ ID NO: 1114 - protein, 375 aa, Artificial Sequence
  source: /note="Description of Artificial Sequence: Synthetic polypeptide"
MTSKQSTIALALLPLLFTPVTKAQLGGSEEEVQIIQPDKSVSVAAGESAILHCTITSLFPVGPIQWFRGAGPARVLIYNQRQGPFPRVTTISETTRRENMDFSISISNITPADAGTYYCIKFRKGSPDTEFKSGAGTELSVRAKPSASAAAPPCPPCPAPEFLGGPSVFLFPPKPKDTLMISRTPEVTCVVVDVSQEDPEVQFNWYVDGVEVHNAKTKPREEQFNSTYRVVSVLTVLHQDWLNGKEYKCKVSNKGLPSSIEKTISKAKGQPREPQVYTLPPSQEEMTKNQVSLTCLVKGFYPSDIAVEWESNGQPENNYKTTPPVLDSDGSFFLYSRLTVDKSRWQEGNVFSCSVMHEALHNHYTQKSLSLSPGK

SEQ ID NO: 1115 - protein, 347 aa, Artificial Sequence
  source: /note="Description of Artificial Sequence: Synthetic polypeptide"
EEEVQIIQPDKSVSVAAGESAILHCTITSLFPVGPIQWFRGAGPARVLIYNQRQGPFPRVTTISETTRRENMDFSISISNITPADAGTYYCIKFRKGSPDTEFKSGAGTELSVRAKPSASAAAPPCPPCPAPEFLGGPSVFLFPPKPKDTLMISRTPEVTCVVVDVSQEDPEVQFNWYVDGVEVHNAKTKPREEQFNSTYRVVSVLTVLHQDWLNGKEYKCKVSNKGLPSSIEKTISKAKGQPREPQVYTLPPSQEEMTKNQVSLTCLVKGFYPSDIAVEWESNGQPENNYKTTPPVLDSDGSFFLYSRLTVDKSRWQEGNVFSCSVMHEALHNHYTQKSLSLSPGK

SEQ ID NO: 1116 - protein, 118 aa, Artificial Sequence
  source: /note="Description of Artificial Sequence: Synthetic polypeptide"
EEEVQIIQPDKSVSVAAGESAILHCTITSLFPVGPIQWFRGAGPARVLIYNQRQGPFPRVTTISETTRRENMDFSISISNITPADAGTYYCIKFRKGSPDTEFKSGAGTELSVRAKPS

SEQ ID NO: 1117 - protein, 227 aa, Artificial Sequence
  source: /note="Description of Artificial Sequence: Synthetic polypeptide"
AAAPPCPPCPAPEFLGGPSVFLFPPKPKDTLMISRTPEVTCVVVDVSQEDPEVQFNWYVDGVEVHNAKTKPREEQFNSTYRVVSVLTVLHQDWLNGKEYKCKVSNKGLPSSIEKTISKAKGQPREPQVYTLPPSQEEMTKNQVSLTCLVKGFYPSDIAVEWESNGQPENNYKTTPPVLDSDGSFFLYSRLTVDKSRWQEGNVFSCSVMHEALHNHYTQKSLSLSPGK

SEQ ID NO: 1118 - protein, 307 aa, Artificial Sequence
  source: /note="Description of Artificial Sequence: Synthetic polypeptide"
MTSKQSTIALALLPLLFTPVTKAQLGGSQVKLLQSGAALVKPGASVKMSCQASGYSFTDYWVTWVKQSHGQSLEWIGEIYPSNTVTNFNDNFKGKATLTVDKSTSTAYMELSRLTSEDSAIYYCTRIGNSGYRVGWFIYWGQGTLVTVLSGGGGSGGGGSGGGGSDTVLTQSPALAVSPGERVTISCKASESVSSHMHWYQQKPGQQPKLLIYKASNLASGVPARFSGSGSGTDFTLTIDPVEADDTATYFCQQGWNGPFTFGAGTRLELKRADAAGSGELGGSGKPIPNPLLGLDSTGSGHHHHHH

SEQ ID NO: 1119 - protein, 21 aa, Homo sapiens
IVVGVVCTLLVALLMAALYLV

SEQ ID NO: 1120 - protein, 110 aa, Homo sapiens
RIRQKKAQGSTSSTRLHEPEKNAREITQDTNDITYADLNLPKGKKPAPQAAEPNNHTEYASIQTSPQPASEDTLTYADLDMVHLNRTPKQPAPKPEPSFSEYASVQVPRK

SEQ ID NO: 1121 - protein, 16 aa, Artificial Sequence
  source: /note="Description of Artificial Sequence: Synthetic peptide"
SGGGGSGGGGSGGGGS

SEQ ID NO: 1122 - DNA, 1452 bp, Artificial Sequence
  source: /note="Description of Artificial Sequence: Synthetic polynucleotide"
atgactagtaaacaatcgaccatcgcattggcgctgcttcctctattgttcacaccggtgacaaaggcagtcgactataaggatgacgacgacaagcaattgggcggtggctttcgtgggccattgttacccaaccgtccattcaccactgtctggaacgccaatacacaatggtgtttggagcgtcatggagtcgatgtagatgtatccgtgtttgatgtcgtggcgaacccgggacagacatttcgtggaccggacatgaccatcttttattcgtcacaacttggcacctacccttattacactcccacgggtgagcctgtctttggtggacttcctcaaaatgcttctttgattgcgcacttggcgcgtactttccaagatatcctggctgccatccctgccccggatttttcgggactggctgtaattgattgggaggcatggcgccctcgttgggccttcaactgggatacaaaggacatttaccgccaacgcagccgcgccttggttcaggcccaacaccccgactggccggcgccccaggtggaagcagttgcacaggaccagttccaaggagccgctcgcgcttggatggcgggtactttacagttggggcgcgctttgcgtcctcgcggcttgtggggattctatggttttccagactgctataactacgacttcttgtctcccaactacaccggacagtgtccctctgggattcgtgctcagaatgaccaacttggatggctgtggggccaaagtcgtgcgctgtatccgagcatttatatgccagccgttctggaaggaacaggcaagtctcagatgtacgttcaacatcgtgtagcggaagcctttcgtgtagccgtggcggcaggtgacccaaatttgccggtcttaccttacgtacagattttttatgacactacaaatcacttccttccactggatgagttagaacattcattgggggagtcagcagctcagggcgcggctggggtggtgttgtgggtgagctgggaaaacacgcgtacgaaagagtcatgccaggctatcaaggaatacatggatacaactcttggtccgtttattttgaatgtgacttctggggcgcttttgtgttcccaggctctttgctcaggtcatgggcgttgcgttcgccgtacctcgcatccgaaagcgcttctgcttctgaacccagcgtcattcagcattcaactgacacctggagggggtcctttatcactgcgcggggctttatctttggaagaccaagctcagatggcggtcgagttcaagtgtcgctgctacccaggttggcaggccccgtggtgcgagcgtaaaagtatgtggaagggcgagctcaattcgaagcttgaaggtaagcctatccctaaccctctcctcggcctcgattctacgcgtaccggtcatcatcaccatcaccattga

SEQ ID NO: 1123 - DNA, 1353 bp, Artificial Sequence
  source: /note="Description of Artificial Sequence: Synthetic polynucleotide"
atgactagtaaacaatcgaccatcgcattggcgctgcttcctctattgttcacaccggtgacaaaggcagtcgactataaggatgacgacgacaagcaattgggcggtggctttcgtgggccattgttacccaaccgtccattcaccactgtctggaacgccaatacacaatggtgtttggagcgtcatggagtcgatgtagatgtatccgtgtttgatgtcgtggcgaacccgggacagacatttcgtggaccggacatgaccatcttttattcgtcacaacttggcacctacccttattacactcccacgggtgagcctgtctttggtggacttcctcaaaatgcttctttgattgcgcacttggcgcgtactttccaagatatcctggctgccatccctgccccggatttttcgggactggctgtaattgattgggaggcatggcgccctcgttgggccttcaactgggatacaaaggacatttaccgccaacgcagccgcgccttggttcaggcccaacaccccgactggccggcgccccaggtggaagcagttgcacaggaccagttccaaggagccgctcgcgcttggatggcgggtactttacagttggggcgcgctttgcgtcctcgcggcttgtggggattctatggttttccagactgctataactacgacttcttgtctcccaactacaccggacagtgtccctctgggattcgtgctcagaatgaccaacttggatggctgtggggccaaagtcgtgcgctgtatccgagcatttatatgccagccgttctggaaggaacaggcaagtctcagatgtacgttcaacatcgtgtagcggaagcctttcgtgtagccgtggcggcaggtgacccaaatttgccggtcttaccttacgtacagattttttatgacactacaaatcacttccttccactggatgagttagaacattcattgggggagtcagcagctcagggcgcggctggggtggtgttgtgggtgagctgggaaaacacgcgtacgaaagagtcatgccaggctatcaaggaatacatggatacaactcttggtccgtttattttgaatgtgacttctggggcgcttttgtgttcccaggctctttgctcaggtcatgggcgttgcgttcgccgtacctcgcatccgaaagcgcttctgcttctgaacccagcgtcattcagcattcaactgacacctggagggggtcctttatcactgcgcggggctttatctttggaagaccaagctcagatggcggtcgagttcaagtgtcgctgctacccaggttggcaggccccgtggtgcgagcgtaaaagtatgtgg

SEQ ID NO: 1124 - DNA, 1440 bp, Artificial Sequence
  source: /note="Description of Artificial Sequence: Synthetic polynucleotide"
atgactagtaaacaatcgaccatcgcattggcgctgcttcctctattgttcacaccggtgacaaaggcagtcgactataaggatgacgacgacaagcaattgggcggtggctctgttgttagcaaccgtccctttatcactgtgtggaacggtgacacacattggtgtttaaccgagtacggggtcgatgtggacgtttcggtctttgacgtcgtggctaataaagagcaatctttccaaggctctaatatgaccatcttctatcgtgaagagcttggcacatacccatactacaccccaactggcgagccagtctttggggggcttccgcaaaatgcctctttggtgactcatctggcgcataccttccaagatatcaaagcggcgatgcccgaaccagatttttccgggttagcggtaatcgactgggaggcatggcgtcctcgctgggcttttaactgggatagtaaagatatttatcgccaacgttctatggaacttgtgcaagcagaacatcctgattggcctgagaccctggtggaggcagctgctaaaaatcagttccaggaggcagcagaagcgtggatggccggaacgctgcagttggggcaagtgttgcgcccgcgcggactttggggctattatggattccccgactgttataacaatgacttcctttcgttaaattacaccggccaatgtcccgtgttcgttcgtgatcagaatgatcagttgggatggttgtggaaccagtcatacgccctttatccatccatctatttacccgccgctttaatgggcacggagaaatctcagatgtatgttcgccaccgtgttcaggaagcattgcgtgttgctattgtttcccgtgacccccacgttccggtcatgccatacgtccaaatcttttacgaaatgaccgactatttgttaccgttagaagagcttgaacacagtttgggggagtcagctgcacaaggtgtagcgggagcagtgctttggttgagttcagacaaaacgtctactaaagaatcatgtcaagcaattaaagcatacatggattccaccttgggtccgtttatcgtgaacgtcacatcggcggcattgttatgctcagaagccctttgctcggggcatggccgctgtgttcgtcatccaagctaccccgaggctctgttgacattgaatcctgcaagtttttcgatcgaactgacacatgacgggcgcccacccagtcttaaaggcaccctttcattgaaagatcgtgctcagatggcgatgaaattccgctgtcgttgctatcgtggttggcgcggcaagtggtgcgataaacgtggtatgaagggcgagctcaattcgaagcttgaaggtaagcctatccctaaccctctcctcggcctcgattctacgcgtaccggtcatcatcaccatcaccattga

SEQ ID NO: 1125 - DNA, 1580 bp, Artificial Sequence
  source: /note="Description of Artificial Sequence: Synthetic polynucleotide"
atgaaacaatcgaccatcgcattggcgctgcttcctctattgttcacaccggtgacaaaggcacaattgggcggtggcatgaaagagattgctgttaccatcgacgataaaaacgtgattgcttcagtcagtgaaagctttcacggcgtcgctttcgacgcttccctgttttctccgaaaggcctgtggagttttgttgacattacgtcacccaagctgtttaaactgcttgagggcctgtctccaggttactttcgcgttggcgggacattcgcgaactggttattcttcgacttagacgagaacaacaagtggaaggattactgggcttttaaagacaaaactcctgagacagccacaattacgcgccgttggttgtttcgcaagcaaaacaatttaaagaaggagacgttcgatgatcttgtcaagctgactaaaggatcaaagatgcgtcttttgtttgacctgaatgcagaagttcgcacagggtacgaaattggcaaaaagatgaccagcacttgggattcatctgaagctgaaaagctgttcaagtactgtgttagcaagggttacggagacaatattgactgggagcttggtaacgaacccgaccacacaagcgcacataacttaactgagaagcaggtgggtgaagatttcaaggcgctgcataaagttttggagaagtatccaaccttaaataaaggatcgttggtagggcctgacgtagggtggatgggggtatcatacgttaaaggtctggccgatggtgcaggtgaccatgtgacagcttttacgttacatcaatactacttcgatggtaacacgtcggatgtgtcaacttacttggacgctacctactttaaaaagttacaacagctgttcgataaggtaaaagacgtcttgaaaaattccccacataaagacaaacccctttggcttggcgaaactagctcgggttacaacagcggaacgaaagatgtgtctgaccgttatgtgtcagggttcttgacacttgataaattgggccttagcgccgctaacaacgtgaaggtcgtcattcgccagactatctataatggttactatggcttgttagacaaaaacacccttgagcctaacccggactattggttgatgcatgtacataactcgctggtagggaacactgtgttcaaggttgacgtgtctgatcctactaacaaggcccgtgtttacgcgcagtgtaccaaaactaatagcaaacatacacaatctcgctactacaaaggttcccttaccatttttgctttgaatgtcggcgacgaggatgtgaccttaaagattgaccaatattctgggaagaaaatttattcatatattctgactccagaggggggtcaactgaccagccaaaaagtacttttgaatggcaaggagttgaaactggtgagcgatcagcttccagagctgaacgcggatgagtccaaaacatcatttacattatctcctaagacgttcgggtttttcgtcgtgagtgacgctaatgtagaagcatgtaagaaaggatccggtcatcaccaccatcaccatcaccatta

SEQ ID NO: 1126 - DNA, 1545 bp, Artificial Sequence
  source: /note="Description of Artificial Sequence: Synthetic polynucleotide"
atgaaacaatcgaccatcgcattggcgctgcttcctctattgttcacaccggtgacaaaggcacaattgggcggtggcatgaaagagattgctgttaccatcgacgataaaaacgtgattgcttcagtcagtgaaagctttcacggcgtcgctttcgacgcttccctgttttctccgaaaggcctgtggagttttgttgacattacgtcacccaagctgtttaaactgcttgagggcctgtctccaggttactttcgcgttggcgggacattcgcgaactggttattcttcgacttagacgagaacaacaagtggaaggattactgggcttttaaagacaaaactcctgagacagccacaattacgcgccgttggttgtttcgcaagcaaaacaatttaaagaaggagacgttcgatgatcttgtcaagctgactaaaggatcaaagatgcgtcttttgtttgacctgaatgcagaagttcgcacagggtacgaaattggcaaaaagatgaccagcacttgggattcatctgaagctgaaaagctgttcaagtactgtgttagcaagggttacggagacaatattgactgggagcttggtaacgaacccgaccacacaagcgcacataacttaactgagaagcaggtgggtgaagatttcaaggcgctgcataaagttttggagaagtatccaaccttaaataaaggatcgttggtagggcctgacgtagggtggatgggggtatcatacgttaaaggtctggccgatggtgcaggtgaccatgtgacagcttttacgttacatcaatactacttcgatggtaacacgtcggatgtgtcaacttacttggacgctacctactttaaaaagttacaacagctgttcgataaggtaaaagacgtcttgaaaaattccccacataaagacaaacccctttggcttggcgaaactagctcgggttacaacagcggaacgaaagatgtgtctgaccgttatgtgtcagggttcttgacacttgataaattgggccttagcgccgctaacaacgtgaaggtcgtcattcgccagactatctataatggttactatggcttgttagacaaaaacacccttgagcctaacccggactattggttgatgcatgtacataactcgctggtagggaacactgtgttcaaggttgacgtgtctgatcctactaacaaggcccgtgtttacgcgcagtgtaccaaaactaatagcaaacatacacaatctcgctactacaaaggttcccttaccatttttgctttgaatgtcggcgacgaggatgtgaccttaaagattgaccaatattctgggaagaaaatttattcatatattctgactccagaggggggtcaactgaccagccaaaaagtacttttgaatggcaaggagttgaaactggtgagcgatcagcttccagagctgaacgcggatgagtccaaaacatcatttacattatctcctaagacgttcgggtttttcgtcgtgagtgacgctaatgtagaagcatgtaagaaa

SEQ ID NO: 1127 - protein, 483 aa, Artificial Sequence
  source: /note="Description of Artificial Sequence: Synthetic polypeptide"
MTSKQSTIALALLPLLFTPVTKAVDYKDDDDKQLGGGFRGPLLPNRPFTTVWNANTQWCLERHGVDVDVSVFDVVANPGQTFRGPDMTIFYSSQLGTYPYYTPTGEPVFGGLPQNASLIAHLARTFQDILAAIPAPDFSGLAVIDWEAWRPRWAFNWDTKDIYRQRSRALVQAQHPDWPAPQVEAVAQDQFQGAARAWMAGTLQLGRALRPRGLWGFYGFPDCYNYDFLSPNYTGQCPSGIRAQNDQLGWLWGQSRALYPSIYMPAVLEGTGKSQMYVQHRVAEAFRVAVAAGDPNLPVLPYVQIFYDTTNHFLPLDELEHSLGESAAQGAAGVVLWVSWENTRTKESCQAIKEYMDTTLGPFILNVTSGALLCSQALCSGHGRCVRRTSHPKALLLLNPASFSIQLTPGGGPLSLRGALSLEDQAQMAVEFKCRCYPGWQAPWCERKSMWKGELNSKLEGKPIPNPLLGLDSTRTGHHHHHH

SEQ ID NO: 1128 - protein, 414 aa, Artificial Sequence
  source: /note="Description of Artificial Sequence: Synthetic polypeptide"
FRGPLLPNRPFTTVWNANTQWCLERHGVDVDVSVFDVVANPGQTFRGPDMTIFYSSQLGTYPYYTPTGEPVFGGLPQNASLIAHLARTFQDILAAIPAPDFSGLAVIDWEAWRPRWAFNWDTKDIYRQRSRALVQAQHPDWPAPQVEAVAQDQFQGAARAWMAGTLQLGRALRPRGLWGFYGFPDCYNYDFLSPNYTGQCPSGIRAQNDQLGWLWGQSRALYPSIYMPAVLEGTGKSQMYVQHRVAEAFRVAVAAGDPNLPVLPYVQIFYDTTNHFLPLDELEHSLGESAAQGAAGVVLWVSWENTRTKESCQAIKEYMDTTLGPFILNVTSGALLCSQALCSGHGRCVRRTSHPKALLLLNPASFSIQLTPGGGPLSLRGALSLEDQAQMAVEFKCRCYPGWQAPWCERKSMW

SEQ ID NO: 1129 - protein, 451 aa, Artificial Sequence
  source: /note="Description of Artificial Sequence: Synthetic polypeptide"
MTSKQSTIALALLPLLFTPVTKAVDYKDDDDKQLGGGFRGPLLPNRPFTTVWNANTQWCLERHGVDVDVSVFDVVANPGQTFRGPDMTIFYSSQLGTYPYYTPTGEPVFGGLPQNASLIAHLARTFQDILAAIPAPDFSGLAVIDWEAWRPRWAFNWDTKDIYRQRSRALVQAQHPDWPAPQVEAVAQDQFQGAARAWMAGTLQLGRALRPRGLWGFYGFPDCYNYDFLSPNYTGQCPSGIRAQNDQLGWLWGQSRALYPSIYMPAVLEGTGKSQMYVQHRVAEAFRVAVAAGDPNLPVLPYVQIFYDTTNHFLPLDELEHSLGESAAQGAAGVVLWVSWENTRTKESCQAIKEYMDTTLGPFILNVTSGALLCSQALCSGHGRCVRRTSHPKALLLLNPASFSIQLTPGGGPLSLRGALSLEDQAQMAVEFKCRCYPGWQAPWCERKSMW

SEQ ID NO: 1130 - protein, 499 aa, Artificial Sequence
  source: /note="Description of Artificial Sequence: Synthetic polypeptide"
MTSKQSTIALALLPLLFTPVTKAKQSTIALALLPLLFTPVTKAVDYKDDDDKDLGGGSVVSNRPFITVWNGDTHWCLTEYGVDVDVSVFDVVANKEQSFQGSNMTIFYREELGTYPYYTPTGEPVFGGLPQNASLVTHLAHTFQDIKAAMPEPDFSGLAVIDWEAWRPRWAFNWDSKDIYRQRSMELVQAEHPDWPETLVEAAAKNQFQEAAEAWMAGTLQLGQVLRPRGLWGYYGFPDCYNNDFLSLNYTGQCPVFVRDQNDQLGWLWNQSYALYPSIYLPAALMGTEKSQMYVRHRVQEALRVAIVSRDPHVPVMPYVQIFYEMTDYLLPLEELEHSLGESAAQGVAGAVLWLSSDKTSTKESCQAIKAYMDSTLGPFIVNVTSAALLCSEALCSGHGRCVRHPSYPEALLTLNPASFSIELTHDGRPPSLKGTLSLKDRAQMAMKFRCRCYRGWRGKWCDKRGMKGELNSKLEGKPIPNPLLGLDSTRTGHHHHHH

SEQ ID NO: 1131 - protein, 489 aa, Hirudo nipponia
MKEIAVTIDDKNVIASVSESFHGVAFDASLFSPKGLWSFVDITSPKLFKLLEGLSPGYFRVGGTFANWLFFDLDENNKWKDYWAFKDKTPETATITRRWLFRKQNNLKKETFDDLVKLTKGSKMRLLFDLNAEVRTGYEIGKKMTSTWDSSEAEKLFKYCVSKGYGDNIDWELGNEPDHTSAHNLTEKQVGEDFKALHKVLEKYPTLNKGSLVGPDVGWMGVSYVKGLADGAGDHVTAFTLHQYYFDGNTSDVSTYLDATYFKKLQQLFDKVKDVLKNSPHKDKPLWLGETSSGYNSGTKDVSDRYVSGFLTLDKLGLSAANNVKVVIRQTIYNGYYGLLDKNTLEPNPDYWLMHVHNSLVGNTVFKVDVSDPTNKARVYAQCTKTNSKHTQSRYYKGSLTIFALNVGDEDVTLKIDQYSGKKIYSYILTPEGGQLTSQKVLLNGKELKLVSDQLPELNADESKTSFTLSPKTFGFFVVSDANVEACKK

SEQ ID NO: 1132 - protein, 78 aa, Homo sapiens
ITCPPPMSVEHADIWVKSYSLYSRERYICNSGFKRKAGTSSLTECVLNKATNVAHWTTPSLKCIRDPALVHQRPAPPS

SEQ ID NO: 1133 - protein, 248 aa, Artificial Sequence
  source: /note="Description of Artificial Sequence: Synthetic polypeptide"
MFKSTLAAMAAVFALSALSPAAMADYKDDDDKIEGRITCPPPMSVEHADIWVKSYSLYSRERYICNSGFKRKAGTSSLTECVLNKATNVAHWTTPSLKCIRDPALVHQRPAPPSSGGSGGGGSGGGSGGGGSLQNWVNVISDLKKIEDLIQSMHIDATLYTESDVHPSCKVTAMKCFLLELQVISLESGDASIHDTVENLIILANDSLSSNGNVTESGCKECEELEEKNIKEFLQSFVHIVQMFINTS

SEQ ID NO: 1134 - protein, 212 aa, Artificial Sequence
  source: /note="Description of Artificial Sequence: Synthetic polypeptide"
ITCPPPMSVEHADIWVKSYSLYSRERYICNSGFKRKAGTSSLTECVLNKATNVAHWTTPSLKCIRDPALVHQRPAPPSSGGSGGGGSGGGSGGGGSLQNWVNVISDLKKIEDLIQSMHIDATLYTESDVHPSCKVTAMKCFLLELQVISLESGDASIHDTVENLIILANDSLSSNGNVTESGCKECEELEEKNIKEFLQSFVHIVQMFINTS

SEQ ID NO: 1135 - protein, 24 aa, Artificial Sequence
  source: /note="Description of Artificial Sequence: Synthetic peptide"
MFKSTLAAMAAVFALSALSPAAMA

SEQ ID NO: 1136 - protein, 114 aa, Homo sapiens
NWVNVISDLKKIEDLIQSMHIDATLYTESDVHPSCKVTAMKCFLLELQVISLESGDASIHDTVENLIILANDSLSSNGNVTESGCKECEELEEKNIKEFLQSFVHIVQMFINTS

SEQ ID NO: 1137 - protein, 20 aa, Artificial Sequence
  source: /note="Description of Artificial Sequence: Synthetic peptide"
SGGSGGGGSGGGSGGGGSLQ

SEQ ID NO: 1138 - DNA, 234 bp, Artificial Sequence
  source: /note="Description of Artificial Sequence: Synthetic polynucleotide"
atcacctgcccgcctccaatgtctgttgagcacgcagatatttgggtaaaatcttactctttatattcccgtgaacgctatatctgtaatagtggcttcaagcgcaaggcaggcacatcctcactgacggagtgtgttttaaacaaagcaacaaacgtcgctcactggacgacgcccagcctgaagtgcatccgcgacccggcattggtccatcaacgtccagcccctccctca

SEQ ID NO: 1139 - DNA, 747 bp, Artificial Sequence
  source: /note="Description of Artificial Sequence: Synthetic polynucleotide"
atgtttaagtctacacttgcagccatggccgcagtcttcgcactgtcagccttgagtcctgctgcaatggcagattataaagacgatgacgataagatcgaaggacgtatcacctgcccgcctccaatgtctgttgagcacgcagatatttgggtaaaatcttactctttatattcccgtgaacgctatatctgtaatagtggcttcaagcgcaaggcaggcacatcctcactgacggagtgtgttttaaacaaagcaacaaacgtcgctcactggacgacgcccagcctgaagtgcatccgcgacccggcattggtccatcaacgtccagcccctccctcatccggagggagcggcggcgggggtagtggaggcgggtcaggcggcgggggctcacttcagaactgggtgaatgtcatctcggacttaaagaagattgaagacttgattcagagcatgcatatcgacgcgactttatacaccgagtctgacgtacacccaagttgcaaggtcaccgccatgaagtgcttcttgcttgagttacaagtcatcagtttggaatctggagacgctagtattcacgatacggtggaaaacctgatcatccttgcaaatgactctctttcatccaatggtaatgttactgagtcggggtgcaaagaatgtgaagaacttgaggagaagaacattaaggaatttcttcagtcattcgtgcatatcgtacagatgttcatcaacacctcttaa

SEQ ID NO: 1140 - DNA, 639 bp, Artificial Sequence
  source: /note="Description of Artificial Sequence: Synthetic polynucleotide"
atcacctgcccgcctccaatgtctgttgagcacgcagatatttgggtaaaatcttactctttatattcccgtgaacgctatatctgtaatagtggcttcaagcgcaaggcaggcacatcctcactgacggagtgtgttttaaacaaagcaacaaacgtcgctcactggacgacgcccagcctgaagtgcatccgcgacccggcattggtccatcaacgtccagcccctccctcatccggagggagcggcggcgggggtagtggaggcgggtcaggcggcgggggctcacttcagaactgggtgaatgtcatctcggacttaaagaagattgaagacttgattcagagcatgcatatcgacgcgactttatacaccgagtctgacgtacacccaagttgcaaggtcaccgccatgaagtgcttcttgcttgagttacaagtcatcagtttggaatctggagacgctagtattcacgatacggtggaaaacctgatcatccttgcaaatgactctctttcatccaatggtaatgttactgagtcggggtgcaaagaatgtgaagaacttgaggagaagaacattaaggaatttcttcagtcattcgtgcatatcgtacagatgttcatcaacacctcttaa

SEQ ID NO: 1141 - DNA, 72 bp, Artificial Sequence
  source: /note="Description of Artificial Sequence: Synthetic oligonucleotide"
atgtttaagtctacacttgcagccatggccgcagtcttcgcactgtcagccttgagtcctgctgcaatggca

SEQ ID NO: 1142 - DNA, 63 bp, Artificial Sequence
  source: /note="Description of Artificial Sequence: Synthetic oligonucleotide"
atgaagcaggcgcttcgcgttgcgtttgggttccttatcctgtgggcatccgtacttcacgcc

SEQ ID NO: 1143 - DNA, 54 bp, Artificial Sequence
  source: /note="Description of Artificial Sequence: Synthetic oligonucleotide"
atgcgcgtactgttattccttctgttgtctctttttatgttgcccgctttcagt

SEQ ID NO: 1144 - DNA, 63 bp, Artificial Sequence
  source: /note="Description of Artificial Sequence: Synthetic oligonucleotide"
atgaagaagactgccatcgctattgccgtcgcccttgcgggtttcgcaaccgtggcgcaagca

SEQ ID NO: 1145 - DNA, 66 bp, Artificial Sequence
  source: /note="Description of Artificial Sequence: Synthetic oligonucleotide"
atgaaatatctgcttccaacggctgctgctggcctgttgcttcttgccgcccagcctgcgatggct

SEQ ID NO: 1146 - DNA, 1749 bp, Artificial Sequence
  source: /note="Description of Artificial Sequence: Synthetic oligonucleotide"
atgaaaaagatttggctggctcttgccggtttagtcctggcattcagcgcaagcgcggtcgactataaggatgacgacgacaagcaattgggcggtggcatctgggagcttaagaaggacgtgtatgtagtggagttagactggtatccagatgcccccggagagatggtggtcttaacatgtgacactccagaggaggacgggattacctggacacttgaccagtcaagcgaggtattgggttctggaaagacgcttactattcaagtcaaagaatttggggatgccgggcagtatacatgtcacaagggcggcgaagttctgtcgcactccttacttttgttacacaaaaaagaagacggcatttggtccacagacatccttaaggaccaaaaggagccgaagaataagacgtttctgcgctgtgaagcgaagaactatagtggtcgctttacttgctggtggttgacgaccatttccactgatttaaccttttcggtaaagagttctcgcgggagttccgacccacagggcgtgacttgtggcgcagccacactttcggcggaacgcgttcgtggggacaataaggaatacgaatattcggtcgagtgtcaggaagattcagcttgccctgccgctgaggagtcacttccgattgaagtgatggttgacgccgtgcacaaattaaagtatgaaaattacacgtcatctttctttatccgtgacattattaagcccgacccgccaaagaatctgcagcttaaacccctgaagaacagccgccaggtggaagtaagctgggaatatcctgacacctggtccactccgcattcgtatttctcgttgacgttttgtgttcaggtgcagggaaagagcaagcgcgaaaagaaggatcgcgtctttacagacaaaacgtccgcgacggttatttgtcgtaagaatgctagtatctctgttcgcgctcaggaccgttattactcatctagttggtcggagtgggcctcggttccctgctctgggggtggaggatcgggtggaggtggctcgggaggtggcggctcccgtaatttaccggtggctactcctgacccagggatgttcccgtgcttgcaccatagccaaaacttacttcgcgctgtcagcaacatgcttcagaaagcacgtcaaacgcttgagttttacccgtgtactagcgaagagatcgatcacgaggacattaccaaagacaaaacctccaccgtcgaggcctgccttccacttgaactgacgaaaaatgagtcatgcttaaattctcgtgaaacctccttcattactaacggatcgtgcctggcctcgcgcaagacttcgttcatgatggcattatgcttgtcgtctatttatgaagaccttaaaatgtatcaagtggagttcaagacgatgaatgcaaaacttcttatggacccgaagcgtcaaatcttcttagaccaaaacatgttggccgtgatcgatgaactgatgcaagccttgaattttaattcggaaactgtaccgcaaaaatcttctcttgaagaaccggatttctataagaccaaaattaaactttgtattttacttcacgctttccgcatccgtgcagtaactatcgaccgcgtaatgagttaccttaacgcctcgggtggcgagctcggtggcagtggtaagcctatccctaaccctctcctcggcctcgattctacgggatccggtcatcaccaccatcaccatcaccat

SEQ ID NO: 1147 - DNA, 1755 bp, Artificial Sequence
  source: /note="Description of Artificial Sequence: Synthetic oligonucleotide"
atgaaacagagcacaatcgctttagccttgctgcctcttcttttcacgcctgtcacgaaggcagtcgactataaggatgacgacgacaagcaattgggcggtggcatctgggagcttaagaaggacgtgtatgtagtggagttagactggtatccagatgcccccggagagatggtggtcttaacatgtgacactccagaggaggacgggattacctggacacttgaccagtcaagcgaggtattgggttctggaaagacgcttactattcaagtcaaagaatttggggatgccgggcagtatacatgtcacaagggcggcgaagttctgtcgcactccttacttttgttacacaaaaaagaagacggcatttggtccacagacatccttaaggaccaaaaggagccgaagaataagacgtttctgcgctgtgaagcgaagaactatagtggtcgctttacttgctggtggttgacgaccatttccactgatttaaccttttcggtaaagagttctcgcgggagttccgacccacagggcgtgacttgtggcgcagccacactttcggcggaacgcgttcgtggggacaataaggaatacgaatattcggtcgagtgtcaggaagattcagcttgccctgccgctgaggagtcacttccgattgaagtgatggttgacgccgtgcacaaattaaagtatgaaaattacacgtcatctttctttatccgtgacattattaagcccgacccgccaaagaatctgcagcttaaacccctgaagaacagccgccaggtggaagtaagctgggaatatcctgacacctggtccactccgcattcgtatttctcgttgacgttttgtgttcaggtgcagggaaagagcaagcgcgaaaagaaggatcgcgtctttacagacaaaacgtccgcgacggttatttgtcgtaagaatgctagtatctctgttcgcgctcaggaccgttattactcatctagttggtcggagtgggcctcggttccctgctctgggggtggaggatcgggtggaggtggctcgggaggtggcggctcccgtaatttaccggtggctactcctgacccagggatgttcccgtgcttgcaccatagccaaaacttacttcgcgctgtcagcaacatgcttcagaaagcacgtcaaacgcttgagttttacccgtgtactagcgaagagatcgatcacgaggacattaccaaagacaaaacctccaccgtcgaggcctgccttccacttgaactgacgaaaaatgagtcatgcttaaattctcgtgaaacctccttcattactaacggatcgtgcctggcctcgcgcaagacttcgttcatgatggcattatgcttgtcgtctatttatgaagaccttaaaatgtatcaagtggagttcaagacgatgaatgcaaaacttcttatggacccgaagcgtcaaatcttcttagaccaaaacatgttggccgtgatcgatgaactgatgcaagccttgaattttaattcggaaactgtaccgcaaaaatcttctcttgaagaaccggatttctataagaccaaaattaaactttgtattttacttcacgctttccgcatccgtgcagtaactatcgaccgcgtaatgagttaccttaacgcctcgggtggcgagctcggtggcagtggtaagcctatccctaaccctctcctcggcctcgattctacgggatccggtcatcaccaccatcaccatcaccat

SEQ ID NO: 1148 - DNA, 1755 bp, Artificial Sequence
  source: /note="Description of Artificial Sequence: Synthetic polynucleotide"
atgaagcaggctctgcgcgtggcatttgggttcctgatcttatgggcgtccgtcttacacgcagtcgactataaggatgacgacgacaagcaattgggcggtggcatctgggagcttaagaaggacgtgtatgtagtggagttagactggtatccagatgcccccggagagatggtggtcttaacatgtgacactccagaggaggacgggattacctggacacttgaccagtcaagcgaggtattgggttctggaaagacgcttactattcaagtcaaagaatttggggatgccgggcagtatacatgtcacaagggcggcgaagttctgtcgcactccttacttttgttacacaaaaaagaagacggcatttggtccacagacatccttaaggaccaaaaggagccgaagaataagacgtttctgcgctgtgaagcgaagaactatagtggtcgctttacttgctggtggttgacgaccatttccactgatttaaccttttcggtaaagagttctcgcgggagttccgacccacagggcgtgacttgtggcgcagccacactttcggcggaacgcgttcgtggggacaataaggaatacgaatattcggtcgagtgtcaggaagattcagcttgccctgccgctgaggagtcacttccgattgaagtgatggttgacgccgtgcacaaattaaagtatgaaaattacacgtcatctttctttatccgtgacattattaagcccgacccgccaaagaatctgcagcttaaacccctgaagaacagccgccaggtggaagtaagctgggaatatcctgacacctggtccactccgcattcgtatttctcgttgacgttttgtgttcaggtgcagggaaagagcaagcgcgaaaagaaggatcgcgtctttacagacaaaacgtccgcgacggttatttgtcgtaagaatgctagtatctctgttcgcgctcaggaccgttattactcatctagttggtcggagtgggcctcggttccctgctctgggggtggaggatcgggtggaggtggctcgggaggtggcggctcccgtaatttaccggtggctactcctgacccagggatgttcccgtgcttgcaccatagccaaaacttacttcgcgctgtcagcaacatgcttcagaaagcacgtcaaacgcttgagttttacccgtgtactagcgaagagatcgatcacgaggacattaccaaagacaaaacctccaccgtcgaggcctgccttccacttgaactgacgaaaaatgagtcatgcttaaattctcgtgaaacctccttcattactaacggatcgtgcctggcctcgcgcaagacttcgttcatgatggcattatgcttgtcgtctatttatgaagaccttaaaatgtatcaagtggagttcaagacgatgaatgcaaaacttcttatggacccgaagcgtcaaatcttcttagaccaaaacatgttggccgtgatcgatgaactgatgcaagccttgaattttaattcggaaactgtaccgcaaaaatcttctcttgaagaaccggatttctataagaccaaaattaaactttgtattttacttcacgctttccgcatccgtgcagtaactatcgaccgcgtaatgagttaccttaacgcctcgggtggcgagctcggtggcagtggtaagcctatccctaaccctctcctcggcctcgattctacgggatccggtcatcaccaccatcaccatcaccat

SEQ ID NO: 1149 - DNA, 1770 bp, Artificial Sequence
  source: /note="Description of Artificial Sequence: Synthetic polynucleotide"
atgaaaatcaagacgggggcacgcattcttgccttgagcgccttgacaacgatgatgttcagtgcaagtgcattagcggtcgactataaggatgacgacgacaagcaattgggcggtggcatctgggagcttaagaaggacgtgtatgtagtggagttagactggtatccagatgcccccggagagatggtggtcttaacatgtgacactccagaggaggacgggattacctggacacttgaccagtcaagcgaggtattgggttctggaaagacgcttactattcaagtcaaagaatttggggatgccgggcagtatacatgtcacaagggcggcgaagttctgtcgcactccttacttttgttacacaaaaaagaagacggcatttggtccacagacatccttaaggaccaaaaggagccgaagaataagacgtttctgcgctgtgaagcgaagaactatagtggtcgctttacttgctggtggttgacgaccatttccactgatttaaccttttcggtaaagagttctcgcgggagttccgacccacagggcgtgacttgtggcgcagccacactttcggcggaacgcgttcgtggggacaataaggaatacgaatattcggtcgagtgtcaggaagattcagcttgccctgccgctgaggagtcacttccgattgaagtgatggttgacgccgtgcacaaattaaagtatgaaaattacacgtcatctttctttatccgtgacattattaagcccgacccgccaaagaatctgcagcttaaacccctgaagaacagccgccaggtggaagtaagctgggaatatcctgacacctggtccactccgcattcgtatttctcgttgacgttttgtgttcaggtgcagggaaagagcaagcgcgaaaagaaggatcgcgtctttacagacaaaacgtccgcgacggttatttgtcgtaagaatgctagtatctctgttcgcgctcaggaccgttattactcatctagttggtcggagtgggcctcggttccctgctctgggggtggaggatcgggtggaggtggctcgggaggtggcggctcccgtaatttaccggtggctactcctgacccagggatgttcccgtgcttgcaccatagccaaaacttacttcgcgctgtcagcaacatgcttcagaaagcacgtcaaacgcttgagttttacccgtgtactagcgaagagatcgatcacgaggacattaccaaagacaaaacctccaccgtcgaggcctgccttccacttgaactgacgaaaaatgagtcatgcttaaattctcgtgaaacctccttcattactaacggatcgtgcctggcctcgcgcaagacttcgttcatgatggcattatgcttgtcgtctatttatgaagaccttaaaatgtatcaagtggagttcaagacgatgaatgcaaaacttcttatggacccgaagcgtcaaatcttcttagaccaaaacatgttggccgtgatcgatgaactgatgcaagccttgaattttaattcggaaactgtaccgcaaaaatcttctcttgaagaaccggatttctataagaccaaaattaaactttgtattttacttcacgctttccgcatccgtgcagtaactatcgaccgcgtaatgagttaccttaacgcctcgggtggcgagctcggtggcagtggtaagcctatccctaaccctctcctcggcctcgattctacgggatccggtcatcaccaccatcaccatcaccat

SEQ ID NO: 1150 - DNA, 1761 bp, Artificial Sequence
  source: /note="Description of Artificial Sequence: Synthetic polynucleotide"
atgaataagaaagtcttgacattgtcggcggtcatggcctcgatgttgttcggggcagcagcccacgcagtcgactataaggatgacgacgacaagcaattgggcggtggcatctgggagcttaagaaggacgtgtatgtagtggagttagactggtatccagatgcccccggagagatggtggtcttaacatgtgacactccagaggaggacgggattacctggacacttgaccagtcaagcgaggtattgggttctggaaagacgcttactattcaagtcaaagaatttggggatgccgggcagtatacatgtcacaagggcggcgaagttctgtcgcactccttacttttgttacacaaaaaagaagacggcatttggtccacagacatccttaaggaccaaaaggagccgaagaataagacgtttctgcgctgtgaagcgaagaactatagtggtcgctttacttgctggtggttgacgaccatttccactgatttaaccttttcggtaaagagttctcgcgggagttccgacccacagggcgtgacttgtggcgcagccacactttcggcggaacgcgttcgtggggacaataaggaatacgaatattcggtcgagtgtcaggaagattcagcttgccctgccgctgaggagtcacttccgattgaagtgatggttgacgccgtgcacaaattaaagtatgaaaattacacgtcatctttctttatccgtgacattattaagcccgacccgccaaagaatctgcagcttaaacccctgaagaacagccgccaggtggaagtaagctgggaatatcctgacacctggtccactccgcattcgtatttctcgttgacgttttgtgttcaggtgcagggaaagagcaagcgcgaaaagaaggatcgcgtctttacagacaaaacgtccgcgacggttatttgtcgtaagaatgctagtatctctgttcgcgctcaggaccgttattactcatctagttggtcggagtgggcctcggttccctgctctgggggtggaggatcgggtggaggtggctcgggaggtggcggctcccgtaatttaccggtggctactcctgacccagggatgttcccgtgcttgcaccatagccaaaacttacttcgcgctgtcagcaacatgcttcagaaagcacgtcaaacgcttgagttttacccgtgtactagcgaagagatcgatcacgaggacattaccaaagacaaaacctccaccgtcgaggcctgccttccacttgaactgacgaaaaatgagtcatgcttaaattctcgtgaaacctccttcattactaacggatcgtgcctggcctcgcgcaagacttcgttcatgatggcattatgcttgtcgtctatttatgaagaccttaaaatgtatcaagtggagttcaagacgatgaatgcaaaacttcttatggacccgaagcgtcaaatcttcttagaccaaaacatgttggccgtgatcgatgaactgatgcaagccttgaattttaattcggaaactgtaccgcaaaaatcttctcttgaagaaccggatttctataagaccaaaattaaactttgtattttacttcacgctttccgcatccgtgcagtaactatcgaccgcgtaatgagttaccttaacgcctcgggtggcgagctcggtggcagtggtaagcctatccctaaccctctcctcggcctcgattctacgggatccggtcatcaccaccatcaccatcaccat

SEQ ID NO: 1151 - DNA, 1758 bp, Artificial Sequence
  source: /note="Description of Artificial Sequence: Synthetic polynucleotide"
atgatgaagcgtaacatcttagccgttattgtccccgcattgcttgtggccgggacggctaacgcagtcgactataaggatgacgacgacaagcaattgggcggtggcatctgggagcttaagaaggacgtgtatgtagtggagttagactggtatccagatgcccccggagagatggtggtcttaacatgtgacactccagaggaggacgggattacctggacacttgaccagtcaagcgaggtattgggttctggaaagacgcttactattcaagtcaaagaatttggggatgccgggcagtatacatgtcacaagggcggcgaagttctgtcgcactccttacttttgttacacaaaaaagaagacggcatttggtccacagacatccttaaggaccaaaaggagccgaagaataagacgtttctgcgctgtgaagcgaagaactatagtggtcgctttacttgctggtggttgacgaccatttccactgatttaaccttttcggtaaagagttctcgcgggagttccgacccacagggcgtgacttgtggcgcagccacactttcggcggaacgcgttcgtggggacaataaggaatacgaatattcggtcgagtgtcaggaagattcagcttgccctgccgctgaggagtcacttccgattgaagtgatggttgacgccgtgcacaaattaaagtatgaaaattacacgtcatctttctttatccgtgacattattaagcccgacccgccaaagaatctgcagcttaaacccctgaagaacagccgccaggtggaagtaagctgggaatatcctgacacctggtccactccgcattcgtatttctcgttgacgttttgtgttcaggtgcagggaaagagcaagcgcgaaaagaaggatcgcgtctttacagacaaaacgtccgcgacggttatttgtcgtaagaatgctagtatctctgttcgcgctcaggaccgttattactcatctagttggtcggagtgggcctcggttccctgctctgggggtggaggatcgggtggaggtggctcgggaggtggcggctcccgtaatttaccggtggctactcctgacccagggatgttcccgtgcttgcaccatagccaaaacttacttcgcgctgtcagcaacatgcttcagaaagcacgtcaaacgcttgagttttacccgtgtactagcgaagagatcgatcacgaggacattaccaaagacaaaacctccaccgtcgaggcctgccttccacttgaactgacgaaaaatgagtcatgcttaaattctcgtgaaacctccttcattactaacggatcgtgcctggcctcgcgcaagacttcgttcatgatggcattatgcttgtcgtctatttatgaagaccttaaaatgtatcaagtggagttcaagacgatgaatgcaaaacttcttatggacccgaagcgtcaaatcttcttagaccaaaacatgttggccgtgatcgatgaactgatgcaagccttgaattttaattcggaaactgtaccgcaaaaatcttctcttgaagaaccggatttctataagaccaaaattaaactttgtattttacttcacgctttccgcatccgtgcagtaactatcgaccgcgtaatgagttaccttaacgcctcgggtggcgagctcggtggcagtggtaagcctatccctaaccctctcctcggcctcgattctacgggatccggtcatcaccaccatcaccatcaccat

SEQ ID NO: 1152 - DNA, 1755 bp, Artificial Sequence
  source: /note="Description of Artificial Sequence: Synthetic polynucleotide"
atgaagaagactgccatcgctattgccgtcgcccttgcgggtttcgcaaccgtggcgcaagcagtcgactataaggatgacgacgacaagcaattgggcggtggcatctgggagcttaagaaggacgtgtatgtagtggagttagactggtatccagatgcccccggagagatggtggtcttaacatgtgacactccagaggaggacgggattacctggacacttgaccagtcaagcgaggtattgggttctggaaagacgcttactattcaagtcaaagaatttggggatgccgggcagtatacatgtcacaagggcggcgaagttctgtcgcactccttacttttgttacacaaaaaagaagacggcatttggtccacagacatccttaaggaccaaaaggagccgaagaataagacgtttctgcgctgtgaagcgaagaactatagtggtcgctttacttgctggtggttgacgaccatttccactgatttaaccttttcggtaaagagttctcgcgggagttccgacccacagggcgtgacttgtggcgcagccacactttcggcggaacgcgttcgtggggacaataaggaatacgaatattcggtcgagtgtcaggaagattcagcttgccctgccgctgaggagtcacttccgattgaagtgatggttgacgccgtgcacaaattaaagtatgaaaattacacgtcatctttctttatccgtgacattattaagcccgacccgccaaagaatctgcagcttaaacccctgaagaacagccgccaggtggaagtaagctgggaatatcctgacacctggtccactccgcattcgtatttctcgttgacgttttgtgttcaggtgcagggaaagagcaagcgcgaaaagaaggatcgcgtctttacagacaaaacgtccgcgacggttatttgtcgtaagaatgctagtatctctgttcgcgctcaggaccgttattactcatctagttggtcggagtgggcctcggttccctgctctgggggtggaggatcgggtggaggtggctcgggaggtggcggctcccgtaatttaccggtggctactcctgacccagggatgttcccgtgcttgcaccatagccaaaacttacttcgcgctgtcagcaacatgcttcagaaagcacgtcaaacgcttgagttttacccgtgtactagcgaagagatcgatcacgaggacattaccaaagacaaaacctccaccgtcgaggcctgccttccacttgaactgacgaaaaatgagtcatgcttaaattctcgtgaaacctccttcattactaacggatcgtgcctggcctcgcgcaagacttcgttcatgatggcattatgcttgtcgtctatttatgaagaccttaaaatgtatcaagtggagttcaagacgatgaatgcaaaacttcttatggacccgaagcgtcaaatcttcttagaccaaaacatgttggccgtgatcgatgaactgatgcaagccttgaattttaattcggaaactgtaccgcaaaaatcttctcttgaagaaccggatttctataagaccaaaattaaactttgtattttacttcacgctttccgcatccgtgcagtaactatcgaccgcgtaatgagttaccttaacgcctcgggtggcgagctcggtggcagtggtaagcctatccctaaccctctcctcggcctcgattctacgggatccggtcatcaccaccatcaccatcaccat

SEQ ID NO: 1153 - DNA, 1746 bp, Artificial Sequence
  source: /note="Description of Artificial Sequence: Synthetic polynucleotide"
atgcgcgtgttattgttcttgctgctgagcttgtttatgttaccagctttcagtgtcgactataaggatgacgacgacaagcaattgggcggtggcatctgggagcttaagaaggacgtgtatgtagtggagttagactggtatccagatgcccccggagagatggtggtcttaacatgtgacactccagaggaggacgggattacctggacacttgaccagtcaagcgaggtattgggttctggaaagacgcttactattcaagtcaaagaatttggggatgccgggcagtatacatgtcacaagggcggcgaagttctgtcgcactccttacttttgttacacaaaaaagaagacggcatttggtccacagacatccttaaggaccaaaaggagccgaagaataagacgtttctgcgctgtgaagcgaagaactatagtggtcgctttacttgctggtggttgacgaccatttccactgatttaaccttttcggtaaagagttctcgcgggagttccgacccacagggcgtgacttgtggcgcagccacactttcggcggaacgcgttcgtggggacaataaggaatacgaatattcggtcgagtgtcaggaagattcagcttgccctgccgctgaggagtcacttccgattgaagtgatggttgacgccgtgcacaaattaaagtatgaaaattacacgtcatctttctttatccgtgacattattaagcccgacccgccaaagaatctgcagcttaaacccctgaagaacagccgccaggtggaagtaagctgggaatatcctgacacctggtccactccgcattcgtatttctcgttgacgttttgtgttcaggtgcagggaaagagcaagcgcgaaaagaaggatcgcgtctttacagacaaaacgtccgcgacggttatttgtcgtaagaatgctagtatctctgttcgcgctcaggaccgttattactcatctagttggtcggagtgggcctcggttccctgctctgggggtggaggatcgggtggaggtggctcgggaggtggcggctcccgtaatttaccggtggctactcctgacccagggatgttcccgtgcttgcaccatagccaaaacttacttcgcgctgtcagcaacatgcttcagaaagcacgtcaaacgcttgagttttacccgtgtactagcgaagagatcgatcacgaggacattaccaaagacaaaacctccaccgtcgaggcctgccttccacttgaactgacgaaaaatgagtcatgcttaaattctcgtgaaacctccttcattactaacggatcgtgcctggcctcgcgcaagacttcgttcatgatggcattatgcttgtcgtctatttatgaagaccttaaaatgtatcaagtggagttcaagacgatgaatgcaaaacttcttatggacccgaagcgtcaaatcttcttagaccaaaacatgttggccgtgatcgatgaactgatgcaagccttgaattttaattcggaaactgtaccgcaaaaatcttctcttgaagaaccggatttctataagaccaaaattaaactttgtattttacttcacgctttccgcatccgtgcagtaactatcgaccgcgtaatgagttaccttaacgcctcgggtggcgagctcggtggcagtggtaagcctatccctaaccctctcctcggcctcgattctacgggatccggtcatcaccaccatcaccatcaccat

SEQ ID NO: 1154 - DNA, 1767 bp, Artificial Sequence
  source: /note="Description of Artificial Sequence: Synthetic polynucleotide"
atgatgattaccttacgcaagttgccccttgcggtagccgttgctgctggtgtgatgtccgcgcaagcaatggctgtcgactataaggatgacgacgacaagcaattgggcggtggcatctgggagcttaagaaggacgtgtatgtagtggagttagactggtatccagatgcccccggagagatggtggtcttaacatgtgacactccagaggaggacgggattacctggacacttgaccagtcaagcgaggtattgggttctggaaagacgcttactattcaagtcaaagaatttggggatgccgggcagtatacatgtcacaagggcggcgaagttctgtcgcactccttacttttgttacacaaaaaagaagacggcatttggtccacagacatccttaaggaccaaaaggagccgaagaataagacgtttctgcgctgtgaagcgaagaactatagtggtcgctttacttgctggtggttgacgaccatttccactgatttaaccttttcggtaaagagttctcgcgggagttccgacccacagggcgtgacttgtggcgcagccacactttcggcggaacgcgttcgtggggacaataaggaatacgaatattcggtcgagtgtcaggaagattcagcttgccctgccgctgaggagtcacttccgattgaagtgatggttgacgccgtgcacaaattaaagtatgaaaattacacgtcatctttctttatccgtgacattattaagcccgacccgccaaagaatctgcagcttaaacccctgaagaacagccgccaggtggaagtaagctgggaatatcctgacacctggtccactccgcattcgtatttctcgttgacgttttgtgttcaggtgcagggaaagagcaagcgcgaaaagaaggatcgcgtctttacagacaaaacgtccgcgacggttatttgtcgtaagaatgctagtatctctgttcgcgctcaggaccgttattactcatctagttggtcggagtgggcctcggttccctgctctgggggtggaggatcgggtggaggtggctcgggaggtggcggctcccgtaatttaccggtggctactcctgacccagggatgttcccgtgcttgcaccatagccaaaacttacttcgcgctgtcagcaacatgcttcagaaagcacgtcaaacgcttgagttttacccgtgtactagcgaagagatcgatcacgaggacattaccaaagacaaaacctccaccgtcgaggcctgccttccacttgaactgacgaaaaatgagtcatgcttaaattctcgtgaaacctccttcattactaacggatcgtgcctggcctcgcgcaagacttcgttcatgatggcattatgcttgtcgtctatttatgaagaccttaaaatgtatcaagtggagttcaagacgatgaatgcaaaacttcttatggacccgaagcgtcaaatcttcttagaccaaaacatgttggccgtgatcgatgaactgatgcaagccttgaattttaattcggaaactgtaccgcaaaaatcttctcttgaagaaccggatttctataagaccaaaattaaactttgtattttacttcacgctttccgcatccgtgcagtaactatcgaccgcgtaatgagttaccttaacgcctcgggtggcgagctcggtggcagtggtaagcctatccctaaccctctcctcggcctcgattctacgggatccggtcatcaccaccatcaccatcaccat

SEQ ID NO: 1155 - skipped

SEQ ID NO: 1156 - DNA, 1758 bp, Artificial Sequence
  source: /note="Description of Artificial Sequence: Synthetic polynucleotide"
atgaaatatcttcttccaacggctgctgctggtttattgcttcttgccgcccagcctgcgatggctgtcgactataaggatgacgacgacaagcaattgggcggtggcatctgggagcttaagaaggacgtgtatgtagtggagttagactggtatccagatgcccccggagagatggtggtcttaacatgtgacactccagaggaggacgggattacctggacacttgaccagtcaagcgaggtattgggttctggaaagacgcttactattcaagtcaaagaatttggggatgccgggcagtatacatgtcacaagggcggcgaagttctgtcgcactccttacttttgttacacaaaaaagaagacggcatttggtccacagacatccttaaggaccaaaaggagccgaagaataagacgtttctgcgctgtgaagcgaagaactatagtggtcgctttacttgctggtggttgacgaccatttccactgatttaaccttttcggtaaagagttctcgcgggagttccgacccacagggcgtgacttgtggcgcagccacactttcggcggaacgcgttcgtggggacaataaggaatacgaatattcggtcgagtgtcaggaagattcagcttgccctgccgctgaggagtcacttccgattgaagtgatggttgacgccgtgcacaaattaaagtatgaaaattacacgtcatctttctttatccgtgacattattaagcccgacccgccaaagaatctgcagcttaaacccctgaagaacagccgccaggtggaagtaagctgggaatatcctgacacctggtccactccgcattcgtatttctcgttgacgttttgtgttcaggtgcagggaaagagcaagcgcgaaaagaaggatcgcgtctttacagacaaaacgtccgcgacggttatttgtcgtaagaatgctagtatctctgttcgcgctcaggaccgttattactcatctagttggtcggagtgggcctcggttccctgctctgggggtggaggatcgggtggaggtggctcgggaggtggcggctcccgtaatttaccggtggctactcctgacccagggatgttcccgtgcttgcaccatagccaaaacttacttcgcgctgtcagcaacatgcttcagaaagcacgtcaaacgcttgagttttacccgtgtactagcgaagagatcgatcacgaggacattaccaaagacaaaacctccaccgtcgaggcctgccttccacttgaactgacgaaaaatgagtcatgcttaaattctcgtgaaacctccttcattactaacggatcgtgcctggcctcgcgcaagacttcgttcatgatggcattatgcttgtcgtctatttatgaagaccttaaaatgtatcaagtggagttcaagacgatgaatgcaaaacttcttatggacccgaagcgtcaaatcttcttagaccaaaacatgttggccgtgatcgatgaactgatgcaagccttgaattttaattcggaaactgtaccgcaaaaatcttctcttgaagaaccggatttctataagaccaaaattaaactttgtattttacttcacgctttccgcatccgtgcagtaactatcgaccgcgtaatgagttaccttaacgcctcgggtggcgagctcggtggcagtggtaagcctatccctaaccctctcctcggcctcgattctacgggatccggtcatcaccaccatcaccatcaccat

SEQ ID NO: 1157 - DNA, 99 bp, Artificial Sequence
  source: /note="Description of Artificial Sequence: Synthetic oligonucleotide"
atggggtacaaaatgaacattagctcgcttcgcaaagcattcatttttatgggggctgttgcagctttaagccttgtcaatgcccagtcagcgcttgcc

SEQ ID NO: 1158 - DNA, 57 bp, Artificial Sequence
  source: /note="Description of Artificial Sequence: Synthetic oligonucleotide"
atgaaaaagatttggctggctcttgccggtttagtcctggcattcagcgcaagcgcg

SEQ ID NO: 1159 - DNA, 63 bp, Artificial Sequence
  source: /note="Description of Artificial Sequence: Synthetic oligonucleotide"
atgaaacagagcacaatcgctttagccttgctgcctcttcttttcacgcctgtcacgaaggca

SEQ ID NO: 1160 - DNA, 63 bp, Artificial Sequence
  source: /note="Description of Artificial Sequence: Synthetic oligonucleotide"
atgaagcaggctctgcgcgtggcatttgggttcctgatcttatgggcgtccgtcttacacgca

SEQ ID NO: 1161 - DNA, 78 bp, Artificial Sequence
  source: /note="Description of Artificial Sequence: Synthetic oligonucleotide"
atgaaaatcaagacgggggcacgcattcttgccttgagcgccttgacaacgatgatgttcagtgcaagtgcattagcg

SEQ ID NO: 1162 - DNA, 69 bp, Artificial Sequence
  source: /note="Description of Artificial Sequence: Synthetic oligonucleotide"
atgaataagaaagtcttgacattgtcggcggtcatggcctcgatgttgttcggggcagcagcccacgca

SEQ ID NO: 1163 - DNA, 66 bp, Artificial Sequence
  source: /note="Description of Artificial Sequence: Synthetic oligonucleotide"
atgatgaagcgtaacatcttagccgttattgtccccgcattgcttgtggccgggacggctaacgca

SEQ ID NO: 1164 - DNA, 63 bp, Artificial Sequence; identical to SEQ ID NO: 1144
  source: /note="Description of Artificial Sequence: Synthetic oligonucleotide"

SEQ ID NO: 1165 - DNA, 54 bp, Artificial Sequence
  source: /note="Description of Artificial Sequence: Synthetic oligonucleotide"
atgcgcgtgttattgttcttgctgctgagcttgtttatgttaccagctttcagt

SEQ ID NO: 1166 - DNA, 75 bp, Artificial Sequence
  source: /note="Description of Artificial Sequence: Synthetic oligonucleotide"
atgatgattaccttacgcaagttgccccttgcggtagccgttgctgctggtgtgatgtccgcgcaagcaatggct

SEQ ID NO: 1167 - DNA, 66 bp, Artificial Sequence
  source: /note="Description of Artificial Sequence: Synthetic oligonucleotide"
atgaaatatcttcttccaacggctgctgctggtttattgcttcttgccgcccagcctgcgatggct

SEQ ID NO: 1168 - DNA, 1554 bp, Artificial Sequence
  source: /note="Description of Artificial Sequence: Synthetic polynucleotide"
atctgggagcttaagaaggacgtgtatgtagtggagttagactggtatccagatgcccccggagagatggtggtcttaacatgtgacactccagaggaggacgggattacctggacacttgaccagtcaagcgaggtattgggttctggaaagacgcttactattcaagtcaaagaatttggggatgccgggcagtatacatgtcacaagggcggcgaagttctgtcgcactccttacttttgttacacaaaaaagaagacggcatttggtccacagacatccttaaggaccaaaaggagccgaagaataagacgtttctgcgctgtgaagcgaagaactatagtggtcgctttacttgctggtggttgacgaccatttccactgatttaaccttttcggtaaagagttctcgcgggagttccgacccacagggcgtgacttgtggcgcagccacactttcggcggaacgcgttcgtggggacaataaggaatacgaatattcggtcgagtgtcaggaagattcagcttgccctgccgctgaggagtcacttccgattgaagtgatggttgacgccgtgcacaaattaaagtatgaaaattacacgtcatctttctttatccgtgacattattaagcccgacccgccaaagaatctgcagcttaaacccctgaagaacagccgccaggtggaagtaagctgggaatatcctgacacctggtccactccgcattcgtatttctcgttgacgttttgtgttcaggtgcagggaaagagcaagcgcgaaaagaaggatcgcgtctttacagacaaaacgtccgcgacggttatttgtcgtaagaatgctagtatctctgttcgcgctcaggaccgttattactcatctagttggtcggagtgggcctcggttccctgctctgggggtggaggatcgggtggaggtggctcgggaggtggcggctcccgtaatttaccggtggctactcctgacccagggatgttcccgtgcttgcaccatagccaaaacttacttcgcgctgtcagcaacatgcttcagaaagcacgtcaaacgcttgagttttacccgtgtactagcgaagagatcgatcacgaggacattaccaaagacaaaacctccaccgtcgaggcctgccttccacttgaactgacgaaaaatgagtcatgcttaaattctcgtgaaacctccttcattactaacggatcgtgcctggcctcgcgcaagacttcgttcatgatggcattatgcttgtcgtctatttatgaagaccttaaaatgtatcaagtggagttcaagacgatgaatgcaaaacttcttatggacccgaagcgtcaaatcttcttagaccaaaacatgttggccgtgatcgatgaactgatgcaagccttgaattttaattcggaaactgtaccgcaaaaatcttctcttgaagaaccggatttctataagaccaaaattaaactttgtattttacttcacgctttccgcatccgtgcagtaactatcgaccgcgtaatgagttaccttaacgcctcg

SEQ ID NO: 1169 - protein, 597 aa, Artificial Sequence
  source: /note="Description of Artificial Sequence: Synthetic polypeptide"
MGYKMNISSLRKAFIFMGAVAALSLVNAQSALAVDYKDDDDKQLGGGIWELKKDVYVVELDWYPDAPGEMVVLTCDTPEEDGITWTLDQSSEVLGSGKTLTIQVKEFGDAGQYTCHKGGEVLSHSLLLLHKKEDGIWSTDILKDQKEPKNKTFLRCEAKNYSGRFTCWWLTTISTDLTFSVKSSRGSSDPQGVTCGAATLSAERVRGDNKEYEYSVECQEDSACPAAEESLPIEVMVDAVHKLKYENYTSSFFIRDIIKPDPPKNLQLKPLKNSRQVEVSWEYPDTWSTPHSYFSLTFCVQVQGKSKREKKDRVFTDKTSATVICRKNASISVRAQDRYYSSSWSEWASVPCSGGGGSGGGGSGGGGSRNLPVATPDPGMFPCLHHSQNLLRAVSNMLQKARQTLEFYPCTSEEIDHEDITKDKTSTVEACLPLELTKNESCLNSRETSFITNGSCLASRKTSFMMALCLSSIYEDLKMYQVEFKTMNAKLLMDPKRQIFLDQNMLAVIDELMQALNFNSETVPQKSSLEEPDFYKTKIKLCILLHAFRIRAVTIDRVMSYLNASGGELGGSGKPIPNPLLGLDSTGSGHHHHHHHH

SEQ ID NO: 1170 - protein, 583 aa, Artificial Sequence
  source: /note="Description of Artificial Sequence: Synthetic polypeptide"
MKKIWLALAGLVLAFSASAVDYKDDDDKQLGGGIWELKKDVYVVELDWYPDAPGEMVVLTCDTPEEDGITWTLDQSSEVLGSGKTLTIQVKEFGDAGQYTCHKGGEVLSHSLLLLHKKEDGIWSTDILKDQKEPKNKTFLRCEAKNYSGRFTCWWLTTISTDLTFSVKSSRGSSDPQGVTCGAATLSAERVRGDNKEYEYSVECQEDSACPAAEESLPIEVMVDAVHKLKYENYTSSFFIRDIIKPDPPKNLQLKPLKNSRQVEVSWEYPDTWSTPHSYFSLTFCVQVQGKSKREKKDRVFTDKTSATVICRKNASISVRAQDRYYSSSWSEWASVPCSGGGGSGGGGSGGGGSRNLPVATPDPGMFPCLHHSQNLLRAVSNMLQKARQTLEFYPCTSEEIDHEDITKDKTSTVEACLPLELTKNESCLNSRETSFITNGSCLASRKTSFMMALCLSSIYEDLKMYQVEFKTMNAKLLMDPKRQIFLDQNMLAVIDELMQALNFNSETVPQKSSLEEPDFYKTKIKLCILLHAFRIRAVTIDRVMSYLNASGGELGGSGKPIPNPLLGLDSTGSGHHHHHHHH

SEQ ID NO: 1171 - protein, 585 aa, Artificial Sequence
  source: /note="Description of Artificial Sequence: Synthetic polypeptide"
MKQSTIALALLPLLFTPVTKAVDYKDDDDKQLGGGIWELKKDVYVVELDWYPDAPGEMVVLTCDTPEEDGITWTLDQSSEVLGSGKTLTIQVKEFGDAGQYTCHKGGEVLSHSLLLLHKKEDGIWSTDILKDQKEPKNKTFLRCEAKNYSGRFTCWWLTTISTDLTFSVKSSRGSSDPQGVTCGAATLSAERVRGDNKEYEYSVECQEDSACPAAEESLPIEVMVDAVHKLKYENYTSSFFIRDIIKPDPPKNLQLKPLKNSRQVEVSWEYPDTWSTPHSYFSLTFCVQVQGKSKREKKDRVFTDKTSATVICRKNASISVRAQDRYYSSSWSEWASVPCSGGGGSGGGGSGGGGSRNLPVATPDPGMFPCLHHSQNLLRAVSNMLQKARQTLEFYPCTSEEIDHEDITKDKTSTVEACLPLELTKNESCLNSRETSFITNGSCLASRKTSFMMALCLSSIYEDLKMYQVEFKTMNAKLLMDPKRQIFLDQNMLAVIDELMQALNFNSETVPQKSSLEEPDFYKTKIKLCILLHAFRIRAVTIDRVMSYLNASGGELGGSGKPIPNPLLGLDSTGSGHHHHHHHH

SEQ ID NO: 1172 - protein, 585 aa, Artificial Sequence
  source: /note="Description of Artificial Sequence: Synthetic polypeptide"
MKQALRVAFGFLILWASVLHAVDYKDDDDKQLGGGIWELKKDVYVVELDWYPDAPGEMVVLTCDTPEEDGITWTLDQSSEVLGSGKTLTIQVKEFGDAGQYTCHKGGEVLSHSLLLLHKKEDGIWSTDILKDQKEPKNKTFLRCEAKNYSGRFTCWWLTTISTDLTFSVKSSRGSSDPQGVTCGAATLSAERVRGDNKEYEYSVECQEDSACPAAEESLPIEVMVDAVHKLKYENYTSSFFIRDIIKPDPPKNLQLKPLKNSRQVEVSWEYPDTWSTPHSYFSLTFCVQVQGKSKREKKDRVFTDKTSATVICRKNASISVRAQDRYYSSSWSEWASVPCSGGGGSGGGGSGGGGSRNLPVATPDPGMFPCLHHSQNLLRAVSNMLQKARQTLEFYPCTSEEIDHEDITKDKTSTVEACLPLELTKNESCLNSRETSFITNGSCLASRKTSFMMALCLSSIYEDLKMYQVEFKTMNAKLLMDPKRQIFLDQNMLAVIDELMQALNFNSETVPQKSSLEEPDFYKTKIKLCILLHAFRIRAVTIDRVMSYLNASGGELGGSGKPIPNPLLGLDSTGSGHHHHHHHH

SEQ ID NO: 1173 - protein, 590 aa, Artificial Sequence
  source: /note="Description of Artificial Sequence: Synthetic polypeptide"
MKIKTGARILALSALTTMMFSASALAVDYKDDDDKQLGGGIWELKKDVYVVELDWYPDAPGEMVVLTCDTPEEDGITWTLDQSSEVLGSGKTLTIQVKEFGDAGQYTCHKGGEVLSHSLLLLHKKEDGIWSTDILKDQKEPKNKTFLRCEAKNYSGRFTCWWLTTISTDLTFSVKSSRGSSDPQGVTCGAATLSAERVRGDNKEYEYSVECQEDSACPAAEESLPIEVMVDAVHKLKYENYTSSFFIRDIIKPDPPKNLQLKPLKNSRQVEVSWEYPDTWSTPHSYFSLTFCVQVQGKSKREKKDRVFTDKTSATVICRKNASISVRAQDRYYSSSWSEWASVPCSGGGGSGGGGSGGGGSRNLPVATPDPGMFPCLHHSQNLLRAVSNMLQKARQTLEFYPCTSEEIDHEDITKDKTSTVEACLPLELTKNESCLNSRETSFITNGSCLASRKTSFMMALCLSSIYEDLKMYQVEFKTMNAKLLMDPKRQIFLDQNMLAVIDELMQALNFNSETVPQKSSLEEPDFYKTKIKLCILLHAFRIRAVTIDRVMSYLNASGGELGGSGKPIPNPLLGLDSTGSGHHHHHHHH

SEQ ID NO: 1174 - protein, 587 aa, Artificial Sequence
  source: /note="Description of Artificial Sequence: Synthetic polypeptide"
MNKKVLTLSAVMASMLFGAAAHAVDYKDDDDKQLGGGIWELKKDVYVVELDWYPDAPGEMVVLTCDTPEEDGITWTLDQSSEVLGSGKTLTIQVKEFGDAGQYTCHKGGEVLSHSLLLLHKKEDGIWSTDILKDQKEPKNKTFLRCEAKNYSGRFTCWWLTTISTDLTFSVKSSRGSSDPQGVTCGAATLSAERVRGDNKEYEYSVECQEDSACPAAEESLPIEVMVDAVHKLKYENYTSSFFIRDIIKPDPPKNLQLKPLKNSRQVEVSWEYPDTWSTPHSYFSLTFCVQVQGKSKREKKDRVFTDKTSATVICRKNASISVRAQDRYYSSSWSEWASVPCSGGGGSGGGGSGGGGSRNLPVATPDPGMFPCLHHSQNLLRAVSNMLQKARQTLEFYPCTSEEIDHEDITKDKTSTVEACLPLELTKNESCLNSRETSFITNGSCLASRKTSFMMALCLSSIYEDLKMYQVEFKTMNAKLLMDPKRQIFLDQNMLAVIDELMQALNFNSETVPQKSSLEEPDFYKTKIKLCILLHAFRIRAVTIDRVMSYLNASGGELGGSGKPIPNPLLGLDSTGSGHHHHHHHH

SEQ ID NO: 1175 - protein, 586 aa, Artificial Sequence
  source: /note="Description of Artificial Sequence: Synthetic polypeptide"
MMKRNILAVIVPALLVAGTANAVDYKDDDDKQLGGGIWELKKDVYVVELDWYPDAPGEMVVLTCDTPEEDGITWTLDQSSEVLGSGKTLTIQVKEFGDAGQYTCHKGGEVLSHSLLLLHKKEDGIWSTDILKDQKEPKNKTFLRCEAKNYSGRFTCWWLTTISTDLTFSVKSSRGSSDPQGVTCGAATLSAERVRGDNKEYEYSVECQEDSACPAAEESLPIEVMVDAVHKLKYENYTSSFFIRDIIKPDPPKNLQLKPLKNSRQVEVSWEYPDTWSTPHSYFSLTFCVQVQGKSKREKKDRVFTDKTSATVICRKNASISVRAQDRYYSSSWSEWASVPCSGGGGSGGGGSGGGGSRNLPVATPDPGMFPCLHHSQNLLRAVSNMLQKARQTLEFYPCTSEEIDHEDITKDKTSTVEACLPLELTKNESCLNSRETSFITNGSCLASRKTSFMMALCLSSIYEDLKMYQVEFKTMNAKLLMDPKRQIFLDQNMLAVIDELMQALNFNSETVPQKSSLEEPDFYKTKIKLCILLHAFRIRAVTIDRVMSYLNASGGELGGSGKPIPNPLLGLDSTGSGHHHHHHHH

SEQ ID NO: 1176 - protein, 585 aa, Artificial Sequence
  source: /note="Description of Artificial Sequence: Synthetic polypeptide"
MKKTAIAIAVALAGFATVAQAVDYKDDDDKQLGGGIWELKKDVYVVELDWYPDAPGEMVVLTCDTPEEDGITWTLDQSSEVLGSGKTLTIQVKEFGDAGQYTCHKGGEVLSHSLLLLHKKEDGIWSTDILKDQKEPKNKTFLRCEAKNYSGRFTCWWLTTISTDLTFSVKSSRGSSDPQGVTCGAATLSAERVRGDNKEYEYSVECQEDSACPAAEESLPIEVMVDAVHKLKYENYTSSFFIRDIIKPDPPKNLQLKPLKNSRQVEVSWEYPDTWSTPHSYFSLTFCVQVQGKSKREKKDRVFTDKTSATVICRKNASISVRAQDRYYSSSWSEWASVPCSGGGGSGGGGSGGGGSRNLPVATPDPGMFPCLHHSQNLLRAVSNMLQKARQTLEFYPCTSEEIDHEDITKDKTSTVEACLPLELTKNESCLNSRETSFITNGSCLASRKTSFMMALCLSSIYEDLKMYQVEFKTMNAKLLMDPKRQIFLDQNMLAVIDELMQALNFNSETVPQKSSLEEPDFYKTKIKLCILLHAFRIRAVTIDRVMSYLNASGGELGGSGKPIPNPLLGLDSTGSGHHHHHHHH

SEQ ID NO: 1177 - protein, 582 aa, Artificial Sequence
  source: /note="Description of Artificial Sequence: Synthetic polypeptide"
MRVLLFLLLSLFMLPAFSVDYKDDDDKQLGGGIWELKKDVYVVELDWYPDAPGEMVVLTCDTPEEDGITWTLDQSSEVLGSGKTLTIQVKEFGDAGQYTCHKGGEVLSHSLLLLHKKEDGIWSTDILKDQKEPKNKTFLRCEAKNYSGRFTCWWLTTISTDLTFSVKSSRGSSDPQGVTCGAATLSAERVRGDNKEYEYSVECQEDSACPAAEESLPIEVMVDAVHKLKYENYTSSFFIRDIIKPDPPKNLQLKPLKNSRQVEVSWEYPDTWSTPHSYFSLTFCVQVQGKSKREKKDRVFTDKTSATVICRKNASISVRAQDRYYSSSWSEWASVPCSGGGGSGGGGSGGGGSRNLPVATPDPGMFPCLHHSQNLLRAVSNMLQKARQTLEFYPCTSEEIDHEDITKDKTSTVEACLPLELTKNESCLNSRETSFITNGSCLASRKTSFMMALCLSSIYEDLKMYQVEFKTMNAKLLMDPKRQIFLDQNMLAVIDELMQALNFNSETVPQKSSLEEPDFYKTKIKLCILLHAFRIRAVTIDRVMSYLNASGGELGGSGKPIPNPLLGLDSTGSGHHHHHHHH

SEQ ID NO: 1178 - protein, 589 aa, Artificial Sequence
  source: /note="Description of Artificial Sequence: Synthetic polypeptide"
MMITLRKLPLAVAVAAGVMSAQAMAVDYKDDDDKQLGGGIWELKKDVYVVELDWYPDAPGEMVVLTCDTPEEDGITWTLDQSSEVLGSGKTLTIQVKEFGDAGQYTCHKGGEVLSHSLLLLHKKEDGIWSTDILKDQKEPKNKTFLRCEAKNYSGRFTCWWLTTISTDLTFSVKSSRGSSDPQGVTCGAATLSAERVRGDNKEYEYSVECQEDSACPAAEESLPIEVMVDAVHKLKYENYTSSFFIRDIIKPDPPKNLQLKPLKNSRQVEVSWEYPDTWSTPHSYFSLTFCVQVQGKSKREKKDRVFTDKTSATVICRKNASISVRAQDRYYSSSWSEWASVPCSGGGGSGGGGSGGGGSRNLPVATPDPGMFPCLHHSQNLLRAVSNMLQKARQTLEFYPCTSEEIDHEDITKDKTSTVEACLPLELTKNESCLNSRETSFITNGSCLASRKTSFMMALCLSSIYEDLKMYQVEFKTMNAKLLMDPKRQIFLDQNMLAVIDELMQALNFNSETVPQKSSLEEPDFYKTKIKLCILLHAFRIRAVTIDRVMSYLNASGGELGGSGKPIPNPLLGLDSTGSGHHHHHHHH

SEQ ID NO: 1179 - protein, 586 aa, Artificial Sequence
  source: /note="Description of Artificial Sequence: Synthetic polypeptide"
MKYLLPTAAAGLLLLAAQPAMAVDYKDDDDKQLGGGIWELKKDVYVVELDWYPDAPGEMVVLTCDTPEEDGITWTLDQSSEVLGSGKTLTIQVKEFGDAGQYTCHKGGEVLSHSLLLLHKKEDGIWSTDILKDQKEPKNKTFLRCEAKNYSGRFTCWWLTTISTDLTFSVKSSRGSSDPQGVTCGAATLSAERVRGDNKEYEYSVECQEDSACPAAEESLPIEVMVDAVHKLKYENYTSSFFIRDIIKPDPPKNLQLKPLKNSRQVEVSWEYPDTWSTPHSYFSLTFCVQVQGKSKREKKDRVFTDKTSATVICRKNASISVRAQDRYYSSSWSEWASVPCSGGGGSGGGGSGGGGSRNLPVATPDPGMFPCLHHSQNLLRAVSNMLQKARQTLEFYPCTSEEIDHEDITKDKTSTVEACLPLELTKNESCLNSRETSFITNGSCLASRKTSFMMALCLSSIYEDLKMYQVEFKTMNAKLLMDPKRQIFLDQNMLAVIDELMQALNFNSETVPQKSSLEEPDFYKTKIKLCILLHAFRIRAVTIDRVMSYLNASGGELGGSGKPIPNPLLGLDSTGSGHHHHHHHH

SEQ ID NO: 1180 - protein, 33 aa, Artificial Sequence
  source: /note="Description of Artificial Sequence: Synthetic polypeptide"
MGYKMNISSLRKAFIFMGAVAALSLVNAQSALA

SEQ ID NO: 1181 - protein, 19 aa, Artificial Sequence
  source: /note="Description of Artificial Sequence: Synthetic peptide"
MKKIWLALAGLVLAFSASA

SEQ ID NO: 1182 - protein, 21 aa, Artificial Sequence
  source: /note="Description of Artificial Sequence: Synthetic peptide"
MKQSTIALALLPLLFTPVTKA

SEQ ID NO: 1183 - protein, 21 aa, Artificial Sequence
  source: /note="Description of Artificial Sequence: Synthetic peptide"
MKQALRVAFGFLILWASVLHA

SEQ ID NO: 1184 - protein, 26 aa, Artificial Sequence
  source: /note="Description of Artificial Sequence: Synthetic peptide"
MKIKTGARILALSALTTMMFSASALA

SEQ ID NO: 1185 - protein, 23 aa, Artificial Sequence
  source: /note="Description of Artificial Sequence: Synthetic peptide"
MNKKVLTLSAVMASMLFGAAAHA

SEQ ID NO: 1186 - protein, 26 aa, Artificial Sequence
  source: /note="Description of Artificial Sequence: Synthetic peptide"
MTNITKRSLVAAGVLAALMAGNVALA

SEQ ID NO: 1187 - protein, 21 aa, Artificial Sequence
  source: /note="Description of Artificial Sequence: Synthetic peptide"
MKKTAIAIAVALAGFATVAQA

SEQ ID NO: 1188 - protein, 18 aa, Artificial Sequence
  source: /note="Description of Artificial Sequence: Synthetic peptide"
MRVLLFLLLSLFMLPAFS

SEQ ID NO: 1189 - protein, 25 aa, Artificial Sequence
  source: /note="Description of Artificial Sequence: Synthetic peptide"
MMITLRKLPLAVAVAAGVMSAQAMA

SEQ ID NO: 1190 - protein, 22 aa, Artificial Sequence
  source: /note="Description of Artificial Sequence: Synthetic peptide"
MKYLLPTAAAGLLLLAAQPAMA

SEQ ID NO: 1191 - protein, 518 aa, Artificial Sequence
  source: /note="Description of Artificial Sequence: Synthetic polypeptide"
IWELKKDVYVVELDWYPDAPGEMVVLTCDTPEEDGITWTLDQSSEVLGSGKTLTIQVKEFGDAGQYTCHKGGEVLSHSLLLLHKKEDGIWSTDILKDQKEPKNKTFLRCEAKNYSGRFTCWWLTTISTDLTFSVKSSRGSSDPQGVTCGAATLSAERVRGDNKEYEYSVECQEDSACPAAEESLPIEVMVDAVHKLKYENYTSSFFIRDIIKPDPPKNLQLKPLKNSRQVEVSWEYPDTWSTPHSYFSLTFCVQVQGKSKREKKDRVFTDKTSATVICRKNASISVRAQDRYYSSSWSEWASVPCSGGGGSGGGGSGGGGSRNLPVATPDPGMFPCLHHSQNLLRAVSNMLQKARQTLEFYPCTSEEIDHEDITKDKTSTVEACLPLELTKNESCLNSRETSFITNGSCLASRKTSFMMALCLSSIYEDLKMYQVEFKTMNAKLLMDPKRQIFLDQNMLAVIDELMQALNFNSETVPQKSSLEEPDFYKTKIKLCILLHAFRIRAVTIDRVMSYLNAS

SEQ ID NO: 1192 - protein, 305 aa, Homo sapiens
IWELKKDVYVVELDWYPDAPGEMVVLTCDTPEEDGITWTLDQSSEVLGSGKTLTIQVKEFGDAGQYTCHKGGEVLSHSLLLLHKKEDGIWSTDILKDQKEPKNKTFLRCEAKNYSGRFTCWWLTTISTDLTFSVKSSRGSSDPQGVTCGAATLSAERVRGDNKEYEYSVECQEDSACPAAEESLPIEVMVDAVHKLKYENYTSSFFIRDIIKPDPPKNLQLKPLKNSRQVEVSWEYPDTWSTPHSYFSLTFCVQVQGKSKREKKDRVFTDKTSATVICRKNASISVRAQDRYYSSSWSEWASVPC

SEQ ID NO: 1193 - protein, 197 aa, Homo sapiens; identical to SEQ ID NO: 1053

SEQ ID NO: 1194 - protein, 16 aa, Artificial Sequence
  source: /note="Description of Artificial Sequence: Synthetic peptide"
SGGGGSGGGGSGGGGS

SEQ ID NO: 1195 - DNA, 711 bp, Artificial Sequence
  source: /note="Description of Artificial Sequence: Synthetic polynucleotide"
atggggtacaaaatgaacattagctcgcttcgcaaagcattcatttttatgggggctgttgcagctttaagccttgtcaatgcccagtcagcgcttgccatgatcacttgtccgccccccatgtctgtggaacacgcggatatttgggtaaagagctactcactgtacagccgtgaacgttatatttgtaactccggcttcaaacgcaaagcaggaacttcatcactgacggagtgtgttttaaataaagctactaacgtcgcgcactggactactccctcattgaagtgcatccgtgatcctgctctgggtggcgggggtagcggcgggggtggaagcgggggtggagggtctggaggaggtgggtctaactgggtgaatgttatctcagatttaaagaaaattgaagacctgatccaatctatgcacatcgacgctactctgtatacagaatcagatgtacatccttcgtgtaaagtgaccgcgatgaagtgttttttgcttgagctgcaagtaatttcccttgagtccggggacgcttcaatccatgacacggtcgagaacctgatcattctggcaaacaatagtttatcatcgaacggtaatgttaccgaatcgggttgcaaagaatgcgaagagttagaggaaaagaacattaaagaatttttgcaatccttcgttcacattgtgcagatgttcattaatacatcg

SEQ ID NO: 1196 - DNA, 666 bp, Artificial Sequence
  source: /note="Description of Artificial Sequence: Synthetic polynucleotide"
atgcgcgtgttattgttcttgctgctgagcttgtttatgttaccagctttcagtatgatcacttgtccgccccccatgtctgtggaacacgcggatatttgggtaaagagctactcactgtacagccgtgaacgttatatttgtaactccggcttcaaacgcaaagcaggaacttcatcactgacggagtgtgttttaaataaagctactaacgtcgcgcactggactactccctcattgaagtgcatccgtgatcctgctctgggtggcgggggtagcggcgggggtggaagcgggggtggagggtctggaggaggtgggtctaactgggtgaatgttatctcagatttaaagaaaattgaagacctgatccaatctatgcacatcgacgctactctgtatacagaatcagatgtacatccttcgtgtaaagtgaccgcgatgaagtgttttttgcttgagctgcaagtaatttcccttgagtccggggacgcttcaatccatgacacggtcgagaacctgatcattctggcaaacaatagtttatcatcgaacggtaatgttaccgaatcgggttgcaaagaatgcgaagagttagaggaaaagaacattaaagaatttttgcaatccttcgttcacattgtgcagatgttcattaatacatcg

SEQ ID NO: 1197 - DNA, 678 bp, Artificial Sequence
  source: /note="Description of Artificial Sequence: Synthetic polynucleotide"
atgaaatatcttcttccaacggctgctgctggtttattgcttcttgccgcccagcctgcgatggctatgatcacttgtccgccccccatgtctgtggaacacgcggatatttgggtaaagagctactcactgtacagccgtgaacgttatatttgtaactccggcttcaaacgcaaagcaggaacttcatcactgacggagtgtgttttaaataaagctactaacgtcgcgcactggactactccctcattgaagtgcatccgtgatcctgctctgggtggcgggggtagcggcgggggtggaagcgggggtggagggtctggaggaggtgggtctaactgggtgaatgttatctcagatttaaagaaaattgaagacctgatccaatctatgcacatcgacgctactctgtatacagaatcagatgtacatccttcgtgtaaagtgaccgcgatgaagtgttttttgcttgagctgcaagtaatttcccttgagtccggggacgcttcaatccatgacacggtcgagaacctgatcattctggcaaacaatagtttatcatcgaacggtaatgttaccgaatcgggttgcaaagaatgcgaagagttagaggaaaagaacattaaagaatttttgcaatccttcgttcacattgtgcagatgttcattaatacatcg

SEQ ID NO: 1198 - DNA, 612 bp, Artificial Sequence
  source: /note="Description of Artificial Sequence: Synthetic polynucleotide"
atgatcacttgtccgccccccatgtctgtggaacacgcggatatttgggtaaagagctactcactgtacagccgtgaacgttatatttgtaactccggcttcaaacgcaaagcaggaacttcatcactgacggagtgtgttttaaataaagctactaacgtcgcgcactggactactccctcattgaagtgcatccgtgatcctgctctgggtggcgggggtagcggcgggggtggaagcgggggtggagggtctggaggaggtgggtctaactgggtgaatgttatctcagatttaaagaaaattgaagacctgatccaatctatgcacatcgacgctactctgtatacagaatcagatgtacatccttcgtgtaaagtgaccgcgatgaagtgttttttgcttgagctgcaagtaatttcccttgagtccggggacgcttcaatccatgacacggtcgagaacctgatcattctggcaaacaatagtttatcatcgaacggtaatgttaccgaatcgggttgcaaagaatgcgaagagttagaggaaaagaacattaaagaatttttgcaatccttcgttcacattgtgcagatgttcattaatacatcg

SEQ ID NO: 1199 - protein, 20 aa, Artificial Sequence
  source: /note="Description of Artificial Sequence: Synthetic peptide"
GGGGSGGGGSGGGGSGGGGS

SEQ ID NO: 1200 - protein, 237 aa, Artificial Sequence
  source: /note="Description of Artificial Sequence: Synthetic polypeptide"
MGYKMNISSLRKAFIFMGAVAALSLVNAQSALAMITCPPPMSVEHADIWVKSYSLYSRERYICNSGFKRKAGTSSLTECVLNKATNVAHWTTPSLKCIRDPALGGGGSGGGGSGGGGSGGGGSNWVNVISDLKKIEDLIQSMHIDATLYTESDVHPSCKVTAMKCFLLELQVISLESGDASIHDTVENLIILANNSLSSNGNVTESGCKECEELEEKNIKEFLQSFVHIVQMFINTS

SEQ ID NO: 1201 - protein, 222 aa, Artificial Sequence
  source: /note="Description of Artificial Sequence: Synthetic polypeptide"
MRVLLFLLLSLFMLPAFSMITCPPPMSVEHADIWVKSYSLYSRERYICNSGFKRKAGTSSLTECVLNKATNVAHWTTPSLKCIRDPALGGGGSGGGGSGGGGSGGGGSNWVNVISDLKKIEDLIQSMHIDATLYTESDVHPSCKVTAMKCFLLELQVISLESGDASIHDTVENLIILANNSLSSNGNVTESGCKECEELEEKNIKEFLQSFVHIVQMFINTS

SEQ ID NO: 1202 - protein, 226 aa, Artificial Sequence
  source: /note="Description of Artificial Sequence: Synthetic polypeptide"
MKYLLPTAAAGLLLLAAQPAMAMITCPPPMSVEHADIWVKSYSLYSRERYICNSGFKRKAGTSSLTECVLNKATNVAHWTTPSLKCIRDPALGGGGSGGGGSGGGGSGGGGSNWVNVISDLKKIEDLIQSMHIDATLYTESDVHPSCKVTAMKCFLLELQVISLESGDASIHDTVENLIILANNSLSSNGNVTESGCKECEELEEKNIKEFLQSFVHIVQMFINTS

SEQ ID NO: 1203 - protein, 204 aa, Artificial Sequence
  source: /note="Description of Artificial Sequence: Synthetic polypeptide"
MITCPPPMSVEHADIWVKSYSLYSRERYICNSGFKRKAGTSSLTECVLNKATNVAHWTTPSLKCIRDPALGGGGSGGGGSGGGGSGGGGSNWVNVISDLKKIEDLIQSMHIDATLYTESDVHPSCKVTAMKCFLLELQVISLESGDASIHDTVENLIILANNSLSSNGNVTESGCKECEELEEKNIKEFLQSFVHIVQMFINTS

SEQ ID NO: 1204 - protein, 114 aa, Homo sapiens; identical to SEQ ID NO: 1057

SEQ ID NO: 1205 - protein, 73 aa, Artificial Sequence; identical to SEQ ID NO: 1061
  source: /note="Description of Artificial Sequence: Synthetic polypeptide"

SEQ ID NO: 1206 - protein, 94 aa, Artificial Sequence; identical to SEQ ID NO: 1073
  source: /note="Description of Artificial Sequence: Synthetic polypeptide"

SEQ ID NO: 1207 - DNA, 222 bp, Artificial Sequence; identical to SEQ ID NO: 1071
  source: /note="Description of Artificial Sequence: Synthetic polynucleotide"

SEQ ID NO: 1208 - DNA, 285 bp, Artificial Sequence
  source: /note="Description of Artificial Sequence: Synthetic polynucleotide"
atgaagcaaagtacgatcgcccttgcgctgttgccccttcttttcacgcccgtcaccaaggcagtgcccctgagccgcaccgtgcgttgtacgtgtatctccatctcaaaccagccggtaaacccgcgtagtttagaaaaactggagattatcccagccagccagttttgcccgcgcgttgagattattgcgaccatgaagaaaaaaggggaaaaacgttgccttaatccagaaagtaaggctatcaaaaacctgttgaaagctgtctcgaaagagcgttcctaa

SEQ ID NO: 1209 - protein, 273 aa, Artificial Sequence
  source: /note="Description of Artificial Sequence: Synthetic polypeptide"
MDFSNMSILHYLANIVDILVVWFVIYKVIMLIRGTKAVQLLKGIFIIIAVKLLSGFFGLQTVEWITDQMLTWGFLAIIIIFQPELRRALETLGRGNIFTRYGSRIEREQHHLIESIEKSTQYMAKRRIGALISVARDTGMDDYIETGIPLNAKISSQLLINIFIPNTPLHDGAVIIKGNEIASAASYLPLSDSPFLSKELGTRHRAALGISEVTDSITIVVSEETGGISLTKGGELFRDVSEEELHKILLKELVTVTAKKPSIFSKWKGGKSE

SEQ ID NO: 1210 - DNA, 822 bp, Artificial Sequence
  source: /note="Description of Artificial Sequence: Synthetic polynucleotide"
atggacttttccaacatgagtatccttcactatttagcgaatattgtagacattttggtggtttggttcgtaatttacaaggttatcatgcttatccgcggcacgaaagccgtccagctgttgaaggggattttcattattattgccgtcaagttacttagcggcttcttcggattgcagacagtggaatggattactgatcaaatgctgacttggggtttcttagccattatcattatctttcaaccggaattgcgtcgtgccctggagactttggggcgtggcaatatctttacccgctatggatcacgcattgagcgtgaacaacaccaccttattgagtctattgaaaagtccacgcaatacatggcgaagcgtcgcattggagctttgatctctgtggctcgtgatacaggcatggacgactacatcgagactggcattccgcttaatgcgaaaatctcatcgcaattattgattaatatcttcatccccaatacccctcttcacgatggcgcagtgatcattaaaggtaacgagatcgcgagcgctgccagttatctgccattgtccgactcgccgtttctttctaaggagctgggaactcgccatcgtgccgcattagggatttccgaggtgacagattcaatcacaatcgttgtcagcgaggaaacaggtgggatttcccttacgaagggaggcgaactgttccgtgatgtatccgaagaagaattgcataagattttgcttaaagagctggtgactgtcacagctaaaaaaccaagcattttctccaaatggaaaggaggtaagtccgagtga

SEQ ID NO: 1211 - DNA, 3787 bp, Artificial Sequence
  source: /note="Description of Artificial Sequence: Synthetic polynucleotide"
tagcggagtgtatactggcttactatgttggcactgatgagggtgtcagtgaagtgcttcatgtggcaggagaaaaaaggctgcaccggtgcgtcagcagaatatgtgatacaggatatattccgcttcctcgctcactgactcgctacgctcggtcgttcgactgcggcgagcggaaatggcttacgaacggggcggagatttcctggaagatgccaggaagatacttaacagggaagtgagagggccgcggcaaagccgtttttccataggctccgcccccctgacaagcatcacgaaatctgacgctcaaatcagtggtggcgaaacccgacaggactataaagataccaggcgtttcccctggcggctccctcgtgcgctctcctgttcctgcctttcggtttaccggtgtcattccgctgttatggccgcgtttgtctcattccacgcctgacactcagttccgggtaggcagttcgctccaagctggactgtatgcacgaaccccccgttcagtccgaccgctgcgccttatccggtaactatcgtcttgagtccaacccggaaagacatgcaaaagcaccactggcagcagccactggtaattgatttagaggagttagtcttgaagtcatgcgccggttaaggctaaactgaaaggacaagttttggtgactgcgctcctccaagccagttacctcggttcaaagagttggtagctcagagaaccttcgaaaaaccgccctgcaaggcggttttttcgttttcagagcaagagattacgcgcagaccaaaacgatctcaagaagatcatcttattaaggggtctgacgctcagtggaacggtgcaccctgcagggctagctgataaagcgttcgcgctgcattcggcagtttaagacccactttcacatttaagttgtttttctaatccgcatatgatcaattcaaggccgaataagaaggctggctctgcaccttggtgatcaaataattcgatagcttgtcgtaataatggcggcatactatcagtagtaggtgtttccctttcttctttagcgacttgatgctcttgatcttccaatacgcaacctaaagtaaaatgccccacagcgctgagtgcatataatgcattctctagtgaaaaaccttgttggcataaaaaggctaattgattttcgagagtttcatactgtttttctgtaggccgtgtacctaaatgtacttttgctccatcgcgatgacttagtaaagcacatctaaaacttttagcgttattacgtaaaaaatcttgccagctttccccttctaaagggcaaaagtgagtatggtgcctatctaacatctcaatggctaaggcgtcgagcaaagcccgcttattttttacatgccaatacaatgtaggctgctctacacctagcttctgggcgagtttacgggttgttaaaccttcgattccgacctcattaagcagctctaatgcgctgttaatcactttacttttatctaatctagacatcattaattcctaatttttgttgacactctatcattgatagagttattttaccactccctatcagtgatagagaaaagtgaacccgcatcccacgctaactaatataaggggggcaagaatggacttttccaacatgagtatccttcactatttagcgaatattgtagacattttggtggtttggttcgtaatttacaaggttatcatgcttatccgcggcacgaaagccgtccagctgttgaaggggattttcattattattgccgtcaagttacttagcggcttcttcggattgcagacagtggaatggattactgatcaaatgctgacttggggtttcttagccattatcattatctttcaaccggaattgcgtcgtgccctggagactttggggcgtggcaatatctttacccgctatggatcacgcattgagcgtgaacaacaccaccttattgagtctattgaaaagtccacgcaatacatggcgaagcgtcgcattggagctttgatctctgtggctcgtgatacaggcatggacgactacatcgagactggcattccgcttaatgcgaaaatctcatcgcaattattgattaatatcttcatccccaatacccctcttcacgatggcgcagtgatcattaaaggtaacgagatcgcgagcgctgccagttatctgccattgtccgactcgccgtttctttctaaggagctgggaactcgccatcgtgccgcattagggatttccgaggtgacagattcaatcacaatcgttgtcagcgaggaaacaggtgggatttcccttacgaagggaggcgaactgttccgtgatgtatccgaagaagaattgcataagattttgcttaaagagctggtgactgtcacagctaaaaaaccaagcattttctccaaatggaaaggaggtaagtccgagtgaggaggaacgattggtaaacccggtgaacgcatgagaaagcccccggaagatcaccttccgggggcttttttattgcgcggaccaaaacgaaaaaagacgctcgaaagcgtctcttttctggaatttggtaccgaggcgtaatgctctgccagtgttacaaccaattaaccaattctgattagaaaaactcatcgagcatcaaatgaaactgcaatttattcatatcaggattatcaataccatatttttgaaaaagccgtttctgtaatgaaggagaaaactcaccgaggcagttccataggatggcaagatcctggtatcggtctgcgattccgactcgtccaacatcaatacaacctattaatttcccctcgtcaaaaataaggttatcaagtgagaaatcaccatgagtgacgactgaatccggtgagaatggcaaaagcttatgcatttctttccagacttgttcaacaggccagccattacgctcgtcatcaaaatcactcgcatcaaccaaaccgttattcattcgtgattgcgcctgagcgagacgaaatacgcgatcgctgttaaaaggacaattacaaacaggaatcgaatgcaaccggcgcaggaacactgccagcgcatcaacaatattttcacctgaatcaggatattcttctaatacctggaatgctgttttcccggggatcgcagtggtgagtaaccatgcatcatcaggagtacggataaaatgcttgatggtcggaagaggcataaattccgtcagccagtttagtctgaccatctcatctgtaacatcattggcaacgctacctttgccatgtttcagaaacaactctggcgcatcgggcttcccatacaatcgatagattgtcgcacctgattgcccgacattatcgcgagcccatttatacccatataaatcagcatccatgttggaatttaatcgcggcctcgagcaagacgtttcccgttgaatatggctcataacaccccttgtattactgtttatgtaagcagacagttttattgttcatgatgatatatttttatcttgtgcaatgtaacatcagagattttgagacacaacgtggctttgttgaataaatcgaacttttgctgagttgaaggatcagatcacgcatcttcccgacaacgcagaccgttccgtggcaaagcaaaagttcaaaatcaccaactggtccacctacaacaaagctctcatcaaccgtggctccctcactttctggctggatgatggggcgattcaggcctggtatgagtcagcaacaccttcttcacgaggcagacctcagcgc

SEQ ID NO: 1212 - DNA, 5519 bp, Artificial Sequence
  source: /note="Description of Artificial Sequence: Synthetic polynucleotide"
agcgcccaatacgcaaaccgcctctccccgcgcgttggccgattcattaatgcagctggcacgacaggtttcccgactggaaagcgggcagtgagcgcaacgcaattaatgtgagttagctcactcattaggcaccccaggctttacactttatgcttccggctcgtatgttgtgtggaattgtgagcggataacaatttcacacaggaaacagctatgaccatgattacgccaagctatttaggtgacactatagaatactcaagctatgcatcaagcttggtaccgagctcggatccactagtaacggccgccagtgtgctggaattcgcccttttaagacccactttcacatttaagttgtttttctaatccgcagatgatcaattcaaggccgaataagaaggctggctctgcaccttggtgatcaaataattcgatagcttgtcgtaataatggcggcatactatcagtagtaggtgtttccctttcttctttagcgacttgatgctcttgatcttccaatacgcaacctaaagtaaaatgccccacagcgctgagtgcatataatgcattctctagtgaaaaaccttgttggcataaaaaggctaattgattttcgagagtttcatactgtttttctgtaggccgtgtacctaaatgtacttttgctccatcgcgatgacttagtaaagcacatctaaaacttttagcgttattacgtaaaaaatcttgccagctttccccttctaaagggcaaaagtgagtatggtgcctatctaacatctcaatggctaaggcgtcgagcaaagcccgcttattttttacatgccaatacaatgtaggctgctctacacctagcttctgggcgagtttacgggttgttaaaccttcgattccgacctcattaagcagctctaatgcgctgttaatcactttacttttatctaatctagacatcattaattcctaatttttgttgacactctatcattgatagagttattttaccactccctatcagtgatagagaaaatgaaaggaggtaaattatgagcaacaatgccttgcagactattattaacgctcgtcttcccggcgaagaaggtctgtggcaaatccatcttcaggatggtaagatttctgccattgatgcccaaagcggggtgatgccaatcacggaaaattcactggatgcagaacagggcttggtaattccgccttttgtagaaccacacatccatttggatactacccagacggcgggtcaacccaactggaaccagagcggtacgcttttcgaagggatcgagcgctgggccgaacgtaaagctcttttgacacatgacgacgtaaagcaacgcgcgtggcagacactgaaatggcaaattgccaatgggattcagcatgtacgcacgcacgtggacgttagcgacgcgaccctgaccgcattaaaggccatgttggaagtgaagcaagaagtggccccttggatcgatctgcaaattgtagcttttccacaagagggtatccttagctacccgaacggagaagctcttttagaggaagcgctgcgcttgggcgctgacgttgtcggtgctattcctcactttgagtttacacgcgagtatggagttgagtcgcttcataagacgttcgctttggcccagaaatacgaccgtttaattgacgtacattgcgatgagatcgacgacgagcaatcccgctttgtagaaacagtcgccgcgttggcgcatcacgaaggcatgggtgcgcgcgtaaccgcctcgcacactactgctatgcactcgtacaacggagcgtatactagccgcctgtttcgcttgctgaaaatgagtggcattaactttgttgccaacccattggtcaatatccatttgcaaggtcgtttcgatacatatccaaaacgtcgtggcatcacccgtgtcaaagagatgctggagtctggcattaatgtgtgttttggacatgacgatgtattcgatccatggtatccgcttggcacggctaacatgttacaagtgttgcacatggggttgcatgtgtgccagttaatgggctacggtcagatcaatgatggcttaaacttaatcacacaccactccgcgcgcactctgaatttgcaagactacggcatcgcagcaggtaactcggccaacctgatcatcttacccgcagaaaacggctttgatgctttgcgccgtcaggtgccggtccgctatagtgtgcgtggtgggaaggttatcgcgtccacccaaccagcacagaccactgtgtaccttgaacagcccgaagctatcgactacaaacgctaaaagggcgaattctgcagatatccatcacactggcggccgctcgagcatgcatctagagggcccaattcgccctatagtgagtcgtattacaattcactggccgtcgttttacaacgtcgtgactgggaaaaccctggcgttacccaacttaatcgccttgcagcacatccccctttcgccagctggcgtaatagcgaagaggcccgcaccgatcgcccttcccaacagttgcgcagcctatacgtacggcagtttaaggtttacacctataaaagagagagccgttatcgtctgtttgtggatgtacagagtgatattattgacacgccggggcgacggatggtgatccccctggccagtgcacgtctgctgtcagataaagtctcccgtgaactttacccggtggtgcatatcggggatgaaagctggcgcatgatgaccaccgatatggccagtgtgccggtctccgttatcggggaagaagtggctgatctcagccaccgcgaaaatgacatcaaaaacgccattaacctgatgttctggggaatataaatgtcaggcatgagattatcaaaaaggatcttcacctagatccttttcacgtagaaagccagtccgcagaaacggtgctgaccccggatgaatgtcagctactgggctatctggacaagggaaaacgcaagcgcaaagagaaagcaggtagcttgcagtgggcttacatggcgatagctagactgggcggttttatggacagcaagcgaaccggaattgccagctggggcgccctctggtaaggttgggaagccctgcaaagtaaactggatggctttctcgccgccaaggatctgatggcgcaggggatcaagctctgatcaagagacaggatgaggatcgtttcgcatgattgaacaagatggattgcacgcaggttctccggccgcttgggtggagaggctattcggctatgactgggcacaacagacaatcggctgctctgatgccgccgtgttccggctgtcagcgcaggggcgcccggttctttttgtcaagaccgacctgtccggtgccctgaatgaactgcaagacgaggcagcgcggctatcgtggctggccacgacgggcgttccttgcgcagctgtgctcgacgttgtcactgaagcgggaagggactggctgctattgggcgaagtgccggggcaggatctcctgtcatctcaccttgctcctgccgagaaagtatccatcatggctgatgcaatgcggcggctgcatacgcttgatccggctacctgcccattcgaccaccaagcgaaacatcgcatcgagcgagcacgtactcggatggaagccggtcttgtcgatcaggatgatctggacgaagagcatcaggggctcgcgccagccgaactgttcgccaggctcaaggcgagcatgcccgacggcgaggatctcgtcgtgacccatggcgatgcctgcttgccgaatatcatggtggaaaatggccgcttttctggattcatcgactgtggccggctgggtgtggcggaccgctatcaggacatagcgttggctacccgtgatattgctgaagagcttggcggcgaatgggctgaccgcttcctcgtgctttacggtatcgccgctcccgattcgcagcgcatcgccttctatcgccttcttgacgagttcttctgaattattaacgcttacaatttcctgatgcggtattttctccttacgcatctgtgcggtatttcacaccgcatacaggtggcacttttcggggaaatgtgcgcggaacccctatttgtttatttttctaaatacattcaaatatgtatccgctcatgagacaataaccctgataaatgcttcaataatagcacgtgaggagggccaccatggccaagttgaccagtgccgttccggtgctcaccgcgcgcgacgtcgccggagcggtcgagttctggaccgaccggctcgggttctcccgggacttcgtggaggacgacttcgccggtgtggtccgggacgacgtgaccctgttcatcagcgcggtccaggaccaggtggtgccggacaacaccctggcctgggtgtgggtgcgcggcctggacgagctgtacgccgagtggtcggaggtcgtgtccacgaacttccgggacgcctccgggccggccatgaccgagatcggcgagcagccgtgggggcgggagttcgccctgcgcgacccggccggcaactgcgtgcacttcgtggccgaggagcaggactgacacgtgctaaaacttcatttttaatttaaaaggatctaggtgaagatcctttttgataatctcatgaccaaaatcccttaacgtgagttttcgttccactgagcgtcagaccccgtagaaaagatcaaaggatcttcttgagatcctttttttctgcgcgtaatctgctgcttgcaaacaaaaaaaccaccgctaccagcggtggtttgtttgccggatcaagagctaccaactctttttccgaaggtaactggcttcagcagagcgcagataccaaatactgtccttctagtgtagccgtagttaggccaccacttcaagaactctgtagcaccgcctacatacctcgctctgctaatcctgttaccagtggctgctgccagtggcgataagtcgtgtcttaccgggttggactcaagacgatagttaccggataaggcgcagcggtcgggctgaacggggggttcgtgcacacagcccagcttggagcgaacgacctacaccgaactgagatacctacagcgtgagctatgagaaagcgccacgcttcccgaagggagaaaggcggacaggtatccggtaagcggcagggtcggaacaggagagcgcacgagggagcttccagggggaaacgcctggtatctttatagtcctgtcgggtttcgccacctctgacttgagcgtcgatttttgtgatgctcgtcaggggggcggagcctatggaaaaacgccagcaacgcggcctttttacggttcctgggcttttgctggccttttgctcacatgttctttcctgcgttatcccctgattctgtggataaccgtattaccgcctttgagtgagctgataccgctcgccgcagccgaacgaccgagcgcagcgagtcagtgagcgaggaagcggaag

SEQ ID NO: 1213 - DNA, 1281 bp, Artificial Sequence
  source: /note="Description of Artificial Sequence: Synthetic polynucleotide"
atgagcaacaatgccttgcagactattattaacgctcgtcttcccggcgaagaaggtctgtggcaaatccatcttcaggatggtaagatttctgccattgatgcccaaagcggggtgatgccaatcacggaaaattcactggatgcagaacagggcttggtaattccgccttttgtagaaccacacatccatttggatactacccagacggcgggtcaacccaactggaaccagagcggtacgcttttcgaagggatcgagcgctgggccgaacgtaaagctcttttgacacatgacgacgtaaagcaacgcgcgtggcagacactgaaatggcaaattgccaatgggattcagcatgtacgcacgcacgtggacgttagcgacgcgaccctgaccgcattaaaggccatgttggaagtgaagcaagaagtggccccttggatcgatctgcaaattgtagcttttccacaagagggtatccttagctacccgaacggagaagctcttttagaggaagcgctgcgcttgggcgctgacgttgtcggtgctattcctcactttgagtttacacgcgagtatggagttgagtcgcttcataagacgttcgctttggcccagaaatacgaccgtttaattgacgtacattgcgatgagatcgacgacgagcaatcccgctttgtagaaacagtcgccgcgttggcgcatcacgaaggcatgggtgcgcgcgtaaccgcctcgcacactactgctatgcactcgtacaacggagcgtatactagccgcctgtttcgcttgctgaaaatgagtggcattaactttgttgccaacccattggtcaatatccatttgcaaggtcgtttcgatacatatccaaaacgtcgtggcatcacccgtgtcaaagagatgctggagtctggcattaatgtgtgttttggacatgacgatgtattcgatccatggtatccgcttggcacggctaacatgttacaagtgttgcacatggggttgcatgtgtgccagttaatgggctacggtcagatcaatgatggcttaaacttaatcacacaccactccgcgcgcactctgaatttgcaagactacggcatcgcagcaggtaactcggccaacctgatcatcttacccgcagaaaacggctttgatgctttgcgccgtcaggtgccggtccgctatagtgtgcgtggtgggaaggttatcgcgtccacccaaccagcacagaccactgtgtaccttgaacagcccgaagctatcgactacaaacgc

SEQ ID NO: 1214 - DNA, 4894 bp, Artificial Sequence
  source: /note="Description of Artificial Sequence: Synthetic polynucleotide"
tagcggagtgtatactggcttactatgttggcactgatgagggtgtcagtgaagtgcttcatgtggcaggagaaaaaaggctgcaccggtgcgtcagcagaatatgtgatacaggatatattccgcttcctcgctcactgactcgctacgctcggtcgttcgactgcggcgagcggaaatggcttacgaacggggcggagatttcctggaagatgccaggaagatacttaacagggaagtgagagggccgcggcaaagccgtttttccataggctccgcccccctgacaagcatcacgaaatctgacgctcaaatcagtggtggcgaaacccgacaggactataaagataccaggcgtttcccctggcggctccctcgtgcgctctcctgttcctgcctttcggtttaccggtgtcattccgctgttatggccgcgtttgtctcattccacgcctgacactcagttccgggtaggcagttcgctccaagctggactgtatgcacgaaccccccgttcagtccgaccgctgcgccttatccggtaactatcgtcttgagtccaacccggaaagacatgcaaaagcaccactggcagcagccactggtaattgatttagaggagttagtcttgaagtcatgcgccggttaaggctaaactgaaaggacaagttttggtgactgcgctcctccaagccagttacctcggttcaaagagttggtagctcagagaaccttcgaaaaaccgccctgcaaggcggttttttcgttttcagagcaagagattacgcgcagaccaaaacgatctcaagaagatcatcttattaaggggtctgacgctcagtggaacggtgcaccctgcagggctagctgataaagcgttcgcgctgcattcggcagtttaagacccactttcacatttaagttgtttttctaatccgcatatgatcaattcaaggccgaataagaaggctggctctgcaccttggtgatcaaataattcgatagcttgtcgtaataatggcggcatactatcagtagtaggtgtttccctttcttctttagcgacttgatgctcttgatcttccaatacgcaacctaaagtaaaatgccccacagcgctgagtgcatataatgcattctctagtgaaaaaccttgttggcataaaaaggctaattgattttcgagagtttcatactgtttttctgtaggccgtgtacctaaatgtacttttgctccatcgcgatgacttagtaaagcacatctaaaacttttagcgttattacgtaaaaaatcttgccagctttccccttctaaagggcaaaagtgagtatggtgcctatctaacatctcaatggctaaggcgtcgagcaaagcccgcttattttttacatgccaatacaatgtaggctgctctacacctagcttctgggcgagtttacgggttgttaaaccttcgattccgacctcattaagcagctctaatgcgctgttaatcactttacttttatctaatctagacatcattaattcctaatttttgttgacactctatcattgatagagttattttaccactccctatcagtgatagagaaaagtgaacttcacttattagggaggaaagaatatgtcaaataacgctctgcagactattataaatgctcgattgccaggggaagaggggttgtggcaaattcaccttcaggatgggaagatctctgcgatagatgcgcagtcgggcgtgatgccaatcactgaaaactctctcgacgcggaacagggcctggttattcctccgtttgttgagccacacattcaccttgatactacgcagacggcaggtcagcccaattggaatcagtctggtaccttgtttgaggggatagagcggtgggccgaacgtaaggcattgctgacccacgatgatgtcaaacagcgcgcttggcagactttaaagtggcaaattgcgaatggcatccagcatgttagaacacacgtggatgtgtcggatgctactctgacggctctgaaagcgatgcttgaagttaagcaggaggttgccccgtggatcgatctgcaaattgttgcattcccgcaggagggcatcctcagctatccgaacggtgaggcgcttctcgaagaagctctcagacttggagcggacgttgtgggcgcgatcccgcatttcgaattcactcgcgagtacggtgtggaatcacttcacaaaacctttgcgctggcacagaagtatgaccgacttattgatgtacattgcgatgaaatagatgatgagcagtccagattcgttgaaaccgttgcagcgttggctcatcacgagggcatgggcgcacgcgtcactgcctcccacacgaccgcgatgcattcgtataacggtgcatacacctcacgcctgtttcggctgttaaaaatgagcggaataaacttcgtcgctaatccattggttaatattcatttgcagggtcgctttgatacgtatccaaaaagacgcggcataacgcgagtcaaagaaatgctggagagtggtatcaatgtgtgctttggccacgatgatgttttcgatccctggtatccgcttggaacggcgaatatgcttcaggttctgcacatggggctgcacgtgtgccagctgatgggttacggacaaattaacgatggcctgaatctcatcacccatcattctgcccgaactcttaacctgcaggattatggaattgcggcgggcaattctgctaatctgataatactgcctgctgaaaacggtttcgacgcgctccgccgacaagtgcccgttcgttacagtgttcgaggcggcaaagtcatcgcgtcaactcaaccagctcaaactactgtatatctggaacagcccgaagctattgactacaaacgaggctcagattataaggacgatgatgataaaggtagcaaaatagttgaagttaaacatcccctcgttaaacacaaactgggcttgatgcgcgaacaggacatatcgaccaaacgcttccgtgaactggcttcagaagtgggctcactactgacgtatgaagcaaccgcagatcttgagacagaaaaagtaactattgaaggctggaatggccccgtagagatagatcagatcaaaggtaaaaaaattacggtcgttccgattttgcgcgccgggctgggcatgatggatggagtgttagaaaacgtcccatccgcccggatctcggtggtcggaatgtaccgcaacgaagagacgcttgaaccagtcccttacttccagaagttggttagtaacatagacgaacgaatggccttaatagtagatccgatgctcgcgactggcggcagcgtgatcgctacgattgatctgttgaaaaaagcggggtgtagttctatcaaagttctggttctcgtcgcggcgccagaaggtattgccgcgttagaaaaagcacatccggacgtcgaactgtacactgcatctattgaccagggattgaacgagcatggatatataattccgggcttgggcgatgcgggagataaaatcttcggtactaagtaaggaggaacgattggtaaacccggtgaacgcatgagaaagcccccggaagatcaccttccgggggcttttttattgcgcggaccaaaacgaaaaaagacgctcgaaagcgtctcttttctggaatttggtaccgaggcgtaatgctctgccagtgttacaaccaattaaccaattctgattagaaaaactcatcgagcatcaaatgaaactgcaatttattcatatcaggattatcaataccatatttttgaaaaagccgtttctgtaatgaaggagaaaactcaccgaggcagttccataggatggcaagatcctggtatcggtctgcgattccgactcgtccaacatcaatacaacctattaatttcccctcgtcaaaaataaggttatcaagtgagaaatcaccatgagtgacgactgaatccggtgagaatggcaaaagcttatgcatttctttccagacttgttcaacaggccagccattacgctcgtcatcaaaatcactcgcatcaaccaaaccgttattcattcgtgattgcgcctgagcgagacgaaatacgcgatcgctgttaaaaggacaattacaaacaggaatcgaatgcaaccggcgcaggaacactgccagcgcatcaacaatattttcacctgaatcaggatattcttctaatacctggaatgctgttttcccggggatcgcagtggtgagtaaccatgcatcatcaggagtacggataaaatgcttgatggtcggaagaggcataaattccgtcagccagtttagtctgaccatctcatctgtaacatcattggcaacgctacctttgccatgtttcagaaacaactctggcgcatcgggcttcccatacaatcgatagattgtcgcacctgattgcccgacattatcgcgagcccatttatacccatataaatcagcatccatgttggaatttaatcgcggcctcgagcaagacgtttcccgttgaatatggctcataacaccccttgtattactgtttatgtaagcagacagttttattgttcatgatgatatatttttatcttgtgcaatgtaacatcagagattttgagacacaacgtggctttgttgaataaatcgaacttttgctgagttgaaggatcagatcacgcatcttcccgacaacgcagaccgttccgtggcaaagcaaaagttcaaaatcaccaactggtccacctacaacaaagctctcatcaaccgtggctccctcactttctggctggatgatggggcgattcaggcctggtatgagtcagcaacaccttcttcacgaggcagacctcagcgc

SEQ ID NO: 1215 - DNA, 1941 bp, Artificial Sequence
  source: /note="Description of Artificial Sequence: Synthetic polynucleotide"
atgtcaaataacgctctgcagactattataaatgctcgattgccaggggaagaggggttgtggcaaattcaccttcaggatgggaagatctctgcgatagatgcgcagtcgggcgtgatgccaatcactgaaaactctctcgacgcggaacagggcctggttattcctccgtttgttgagccacacattcaccttgatactacgcagacggcaggtcagcccaattggaatcagtctggtaccttgtttgaggggatagagcggtgggccgaacgtaaggcattgctgacccacgatgatgtcaaacagcgcgcttggcagactttaaagtggcaaattgcgaatggcatccagcatgttagaacacacgtggatgtgtcggatgctactctgacggctctgaaagcgatgcttgaagttaagcaggaggttgccccgtggatcgatctgcaaattgttgcattcccgcaggagggcatcctcagctatccgaacggtgaggcgcttctcgaagaagctctcagacttggagcggacgttgtgggcgcgatcccgcatttcgaattcactcgcgagtacggtgtggaatcacttcacaaaacctttgcgctggcacagaagtatgaccgacttattgatgtacattgcgatgaaatagatgatgagcagtccagattcgttgaaaccgttgcagcgttggctcatcacgagggcatgggcgcacgcgtcactgcctcccacacgaccgcgatgcattcgtataacggtgcatacacctcacgcctgtttcggctgttaaaaatgagcggaataaacttcgtcgctaatccattggttaatattcatttgcagggtcgctttgatacgtatccaaaaagacgcggcataacgcgagtcaaagaaatgctggagagtggtatcaatgtgtgctttggccacgatgatgttttcgatccctggtatccgcttggaacggcgaatatgcttcaggttctgcacatggggctgcacgtgtgccagctgatgggttacggacaaattaacgatggcctgaatctcatcacccatcattctgcccgaactcttaacctgcaggattatggaattgcggcgggcaattctgctaatctgataatactgcctgctgaaaacggtttcgacgcgctccgccgacaagtgcccgttcgttacagtgttcgaggcggcaaagtcatcgcgtcaactcaaccagctcaaactactgtatatctggaacagcccgaagctattgactacaaacgaggctcagattataaggacgatgatgataaaggtagcaaaatagttgaagttaaacatcccctcgttaaacacaaactgggcttgatgcgcgaacaggacatatcgaccaaacgcttccgtgaactggcttcagaagtgggctcactactgacgtatgaagcaaccgcagatcttgagacagaaaaagtaactattgaaggctggaatggccccgtagagatagatcagatcaaaggtaaaaaaattacggtcgttccgattttgcgcgccgggctgggcatgatggatggagtgttagaaaacgtcccatccgcccggatctcggtggtcggaatgtaccgcaacgaagagacgcttgaaccagtcccttacttccagaagttggttagtaacatagacgaacgaatggccttaatagtagatccgatgctcgcgactggcggcagcgtgatcgctacgattgatctgttgaaaaaagcggggtgtagttctatcaaagttctggttctcgtcgcggcgccagaaggtattgccgcgttagaaaaagcacatccggacgtcgaactgtacactgcatctattgaccagggattgaacgagcatggatatataattccgggcttgggcgatgcgggagataaaatcttcggtactaagtaa

SEQ ID NO: 1216 - protein, 427 aa, Artificial Sequence
  source: /note="Description of Artificial Sequence: Synthetic polypeptide"
MSNNALQTIINARLPGEEGLWQIHLQDGKISAIDAQSGVMPITENSLDAEQGLVIPPFVEPHIHLDTTQTAGQPNWNQSGTLFEGIERWAERKALLTHDDVKQRAWQTLKWQIANGIQHVRTHVDVSDATLTALKAMLEVKQEVAPWIDLQIVAFPQEGILSYPNGEALLEEALRLGADVVGAIPHFEFTREYGVESLHKTFALAQKYDRLIDVHCDEIDDEQSRFVETVAALAHHEGMGARVTASHTTAMHSYNGAYTSRLFRLLKMSGINFVANPLVNIHLQGRFDTYPKRRGITRVKEMLESGINVCFGHDDVFDPWYPLGTANMLQVLHMGLHVCQLMGYGQINDGLNLITHHSARTLNLQDYGIAAGNSANLIILPAENGFDALRRQVPVRYSVRGGKVIASTQPAQTTVYLEQPEAIDYKR

SEQ ID NO: 1217 - protein, 646 aa, Artificial Sequence
  source: /note="Description of Artificial Sequence: Synthetic polypeptide"
MSNNALQTIINARLPGEEGLWQIHLQDGKISAIDAQSGVMPITENSLDAEQGLVIPPFVEPHIHLDTTQTAGQPNWNQSGTLFEGIERWAERKALLTHDDVKQRAWQTLKWQIANGIQHVRTHVDVSDATLTALKAMLEVKQEVAPWIDLQIVAFPQEGILSYPNGEALLEEALRLGADVVGAIPHFEFTREYGVESLHKTFALAQKYDRLIDVHCDEIDDEQSRFVETVAALAHHEGMGARVTASHTTAMHSYNGAYTSRLFRLLKMSGINFVANPLVNIHLQGRFDTYPKRRGITRVKEMLESGINVCFGHDDVFDPWYPLGTANMLQVLHMGLHVCQLMGYGQINDGLNLITHHSARTLNLQDYGIAAGNSANLIILPAENGFDALRRQVPVRYSVRGGKVIASTQPAQTTVYLEQPEAIDYKRGSDYKDDDDKGSKIVEVKHPLVKHKLGLMREQDISTKRFRELASEVGSLLTYEATADLETEKVTIEGWNGPVEIDQIKGKKITVVPILRAGLGMMDGVLENVPSARISVVGMYRNEETLEPVPYFQKLVSNIDERMALIVDPMLATGGSVIATIDLLKKAGCSSIKVLVLVAAPEGIAALEKAHPDVELYTASIDQGLNEHGYIIPGLGDAGDKIFGTK

SEQ ID NO: 1218 - protein, 52 aa, Artificial Sequence
  source: /note="Description of Artificial Sequence: Synthetic polypeptide"
MKRHLNTSYRLVWNHITGAFVVASELARARGKRAGVAVALSLAAATSLPALA

SEQ ID NO: 1219 - protein, 53 aa, Artificial Sequence
  source: /note="Description of Artificial Sequence: Synthetic polypeptide"
MNKIFKVIWNPATGSYTVASETAKSRGKKSGRSKLLISALVAGGLLSSFGASA

SEQ ID NO: 1220 - protein, 22 aa, Artificial Sequence
  source: /note="Description of Artificial Sequence: Synthetic peptide"
MQLRKPATAILALALSAGLAQA

SEQ ID NO: 1221 - protein, 40 aa, Artificial Sequence
  source: /note="Description of Artificial Sequence: Synthetic polypeptide"
MFWRDMTLSVWRKKTTGLKTKKRLLALVLAAALCSSPVWA

SEQ ID NO: 1222 - DNA, 159 bp, Artificial Sequence
  source: /note="Description of Artificial Sequence: Synthetic polynucleotide"
atgaacaagattttcaaggttatctggaaccccgcgacaggcagctacactgtggcctccgaaaccgctaagtcgcgcggcaagaagtcaggacgttcaaagctgcttatttctgctttagtagccggaggattactttctagctttggagcctcggca

SEQ ID NO: 1223 - DNA, 57 bp, Artificial Sequence
  source: /note="Description of Artificial Sequence: Synthetic oligonucleotide"
atgaaaaaaatctggctggcattagcaggcttagtcctggcctttagtgcctcggca

SEQ ID NO: 1224 - DNA, 66 bp, Artificial Sequence
  source: /note="Description of Artificial Sequence: Synthetic oligonucleotide"
atgcagttgcgcaagcctgccacggcaattttagcattagctctttctgcgggcttggcccaggca

SEQ ID NO: 1225 - DNA, 120 bp, Artificial Sequence
  source: /note="Description of Artificial Sequence: Synthetic polynucleotide"
atgttctggcgcgacatgacactgagcgtttggcgtaaaaaaacaacgggactgaaaaccaaaaagcgtttgttagcccttgtcctggcggcagccctgtgctcgtccccggtatgggca

SEQ ID NO: 1226 - DNA, 99 bp, Artificial Sequence
  source: /note="Description of Artificial Sequence: Synthetic oligonucleotide"
atgggatacaagatgaacatttcatcacttcgcaaagcttttatcttcatgggtgccgttgctgctctgtcactggtcaatgctcaatcggccctggca

SEQ ID NO: 1227 - DNA, 78 bp, Artificial Sequence
  source: /note="Description of Artificial Sequence: Synthetic oligonucleotide"
atgaagattaaaacaggcgctcgtattttggccctgtctgcgcttacgactatgatgtttagtgcctcggccctggca

SEQ ID NO: 1228 - DNA, 78 bp, Artificial Sequence
  source: /note="Description of Artificial Sequence: Synthetic oligonucleotide"
atgacgaatatcactaaacgtagccttgtggccgcgggggtcttggctgcattgatggctggcaatgttgctctggca

SEQ ID NO: 1229 - DNA, 66 bp, Artificial Sequence
  source: /note="Description of Artificial Sequence: Synthetic oligonucleotide"
atgaaatatctgttgcccacggctgccgcgggtctgctgctgctggcagcgcaaccggctatggca

SEQ ID NO: 1230 - DNA, 63 bp, Artificial Sequence
  source: /note="Description of Artificial Sequence: Synthetic oligonucleotide"
atgaagcaaagtacgatcgcccttgcgctgttgccccttcttttcacgcccgtcaccaaggca

SEQ ID NO: 1231 - protein, 343 aa, Homo sapiens
EEELQVIQPDKSVLVAAGETATLRCTATSLIPVGPIQWFRGAGPGRELIYNQKEGHFPRVTTVSDLTKRNNMDFSIRIGNITPADAGTYYCVKFRKGSPDDVEFKSGAGTELSVRAKPSAPVVSGPAARATPQHTVSFTCESHGFSPRDITLKWFKNGNELSDFQTNVDPVGESVSYSIHSTAKVVLTREDVHSQVICEVAHVTLQGDPLRGTANLSETIRVPPTLEVTQQPVRAENQVNVTCQVRKFYPQRLQLTWLENGNVSRTETASTVTENKDGTYNWMSWLLVNVSAHRDDVKLTCQVEHDGQPAVSKSHDLKVSAHPKEQGSNTAAENTGSNERNIY

SEQ ID NO: 1232 - DNA, 342 bp, Artificial Sequence
  source: /note="Description of Artificial Sequence: Synthetic polynucleotide"
aactgggtgaatgtcatctcggacttaaagaagattgaagacttgattcagagcatgcatatcgacgcgactttatacaccgagtctgacgtacacccaagttgcaaggtcaccgccatgaagtgcttcttgcttgagttacaagtcatcagtttggaatctggagacgctagtattcacgatacggtggaaaacctgatcatccttgcaaatgactctctttcatccaatggtaatgttactgagtcggggtgcaaagaatgtgaagaacttgaggagaagaacattaaggaatttcttcagtcattcgtgcatatcgtacagatgttcatcaacacctct

SEQ ID NO: 1233 - DNA, 60 bp, Artificial Sequence
  source: /note="Description of Artificial Sequence: Synthetic oligonucleotide"
tccggagggagcggcggcgggggtagtggaggcgggtcaggcggcgggggctcacttcag

SEQ ID NO: 1234 - DNA, 36 bp, Artificial Sequence
  source: /note="Description of Artificial Sequence: Synthetic oligonucleotide"
gattataaagacgatgacgataagatcgaaggacgt

SEQ ID NO: 1235 - DNA, 1791 bp, Artificial Sequence
  source: /note="Description of Artificial Sequence: Synthetic polynucleotide"
atggggtacaaaatgaacattagctcgcttcgcaaagcattcatttttatgggggctgttgcagctttaagccttgtcaatgcccagtcagcgcttgccgtcgactataaggatgacgacgacaagcaattgggcggtggcatctgggagcttaagaaggacgtgtatgtagtggagttagactggtatccagatgcccccggagagatggtggtcttaacatgtgacactccagaggaggacgggattacctggacacttgaccagtcaagcgaggtattgggttctggaaagacgcttactattcaagtcaaagaatttggggatgccgggcagtatacatgtcacaagggcggcgaagttctgtcgcactccttacttttgttacacaaaaaagaagacggcatttggtccacagacatccttaaggaccaaaaggagccgaagaataagacgtttctgcgctgtgaagcgaagaactatagtggtcgctttacttgctggtggttgacgaccatttccactgatttaaccttttcggtaaagagttctcgcgggagttccgacccacagggcgtgacttgtggcgcagccacactttcggcggaacgcgttcgtggggacaataaggaatacgaatattcggtcgagtgtcaggaagattcagcttgccctgccgctgaggagtcacttccgattgaagtgatggttgacgccgtgcacaaattaaagtatgaaaattacacgtcatctttctttatccgtgacattattaagcccgacccgccaaagaatctgcagcttaaacccctgaagaacagccgccaggtggaagtaagctgggaatatcctgacacctggtccactccgcattcgtatttctcgttgacgttttgtgttcaggtgcagggaaagagcaagcgcgaaaagaaggatcgcgtctttacagacaaaacgtccgcgacggttatttgtcgtaagaatgctagtatctctgttcgcgctcaggaccgttattactcatctagttggtcggagtgggcctcggttccctgctctgggggtggaggatcgggtggaggtggctcgggaggtggcggctcccgtaatttaccggtggctactcctgacccagggatgttcccgtgcttgcaccatagccaaaacttacttcgcgctgtcagcaacatgcttcagaaagcacgtcaaacgcttgagttttacccgtgtactagcgaagagatcgatcacgaggacattaccaaagacaaaacctccaccgtcgaggcctgccttccacttgaactgacgaaaaatgagtcatgcttaaattctcgtgaaacctccttcattactaacggatcgtgcctggcctcgcgcaagacttcgttcatgatggcattatgcttgtcgtctatttatgaagaccttaaaatgtatcaagtggagttcaagacgatgaatgcaaaacttcttatggacccgaagcgtcaaatcttcttagaccaaaacatgttggccgtgatcgatgaactgatgcaagccttgaattttaattcggaaactgtaccgcaaaaatcttctcttgaagaaccggatttctataagaccaaaattaaactttgtattttacttcacgctttccgcatccgtgcagtaactatcgaccgcgtaatgagttaccttaacgcctcgggtggcgagctcggtggcagtggtaagcctatccctaaccctctcctcggcctcgattctacgggatccggtcatcaccaccatcaccatcaccat

SEQ ID NO: 1236 - protein, 69 aa, Artificial Sequence
  source: /note="Description of Artificial Sequence: Synthetic polypeptide"
ITCPPPMSVEHADIWVKSYSLYSRERYICNSGFKRKAGTSSLTECVLNKATNVAHWTTPSLKCIRDPAL

SEQ ID NO: 1237 - DNA, 72 bp, Artificial Sequence; identical to SEQ ID NO: 1141
  source: /note="Description of Artificial Sequence: Synthetic oligonucleotide"

SEQ ID NO: 1238 - protein, 18 aa, Artificial Sequence
  source: /note="Description of Artificial Sequence: Synthetic peptide"
KESGSVSSEQLAQFRSLD

SEQ ID NO: 1239 - protein, 14 aa, Artificial Sequence
  source: /note="Description of Artificial Sequence: Synthetic peptide"
EGKSSGSGSESKST

SEQ ID NO: 1240 - protein, 8 aa, Artificial Sequence
  source: /note="Description of Artificial Sequence: Synthetic peptide"
GGGGGGGG

SEQ ID NO: 1241 - protein, 12 aa, Artificial Sequence
  source: /note="Description of Artificial Sequence: Synthetic peptide"
GSAGSAAGSGEF

SEQ ID NO: 1242 - protein, 30 aa, Artificial Sequence
  source: /note="Description of Artificial Sequence: Synthetic polypeptide"
  MISC_FEATURE (1)..(30): /note="This sequence may encompass 1-6 'Gly Gly Gly Gly Ser' repeating units"
GGGGSGGGGSGGGGSGGGGSGGGGSGGGGS

SEQ ID NO: 1243 - protein, 16 aa, Artificial Sequence
  source: /note="Description of Artificial Sequence: Synthetic peptide"
SGGGGSGGGGSGGGGS

SEQ ID NO: 1244 - protein, 9 aa, Artificial Sequence
  source: /note="Description of Artificial Sequence: Synthetic peptide"
GGGGSGGGS

SEQ ID NO: 1245 - protein, 5 aa, Artificial Sequence
  source: /note="Description of Artificial Sequence: Synthetic peptide"
GGGGS

SEQ ID NO: 1246 - DNA, 18 bp, Artificial Sequence
  source: /note="Description of Artificial Sequence: Synthetic oligonucleotide"
  modified_base (2)..(2): a, c, t, g, unknown or other
  modified_base (17)..(17): a, c, t, g, unknown or other
wntgaatwwwwattcanw

SEQ ID NO: 1247 - protein, 15 aa, Artificial Sequence
  source: /note="Description of Artificial Sequence: Synthetic peptide"
GGGGSGGGGSGGGGS

SEQ ID NO: 1248 - protein, 6 aa, Artificial Sequence
  source: /note="Description of Artificial Sequence: Synthetic peptide"
  MOD_RES (6)..(6): 1,3 dimethyl-His
CAVAYH

SEQ ID NO: 1249 - DNA, 18 bp, Artificial Sequence
  source: /note="Description of Artificial Sequence: Synthetic oligonucleotide"
ttgttgayryrtcaacwa

SEQ ID NO: 1250 - DNA, 24 bp, Artificial Sequence
  source: /note="Description of Artificial Sequence: Synthetic oligonucleotide"
ggaaaatttttttaaaaaaaaaac

SEQ ID NO: 1251 - protein, 8 aa, Artificial Sequence
  source: /note="Description of Artificial Sequence: Synthetic peptide"
AGYGSTLT

SEQ ID NO: 1252 - protein, 6 aa, Artificial Sequence
  source: /note="Description of Artificial Sequence: Synthetic 6xHis tag"
HHHHHH

SEQ ID NO: 1253 - DNA, 57 bp, Artificial Sequence
  source: /note="Description of Artificial Sequence: Synthetic oligonucleotide"
atgaagaaaatttggctggcacttgccggtttggtattagcgttttccgcctcggca

SEQ ID NO: 1254 - protein, 522 aa, Homo sapiens
MQPWHGKAMQRASEAGATAPKASARNARGAPMDPTESPAAPEAALPKAGKFGPARKSGSRQKKSAPDTQERPPVRATGARAKKAPQRAQDTQPSDATSAPGAEGLEPPAAREPALSRAGSCRQRGARCSTKPRPPPGPWDVPSPGLPVSAPILVRRDAAPGASKLRAVLEKLKLSRDDISTAAGMVKGVVDHLLLRLKCDSAFRGVGLLNTGSYYEHVKISAPNEFDVMFKLEVPRIQLEEYSNTRAYYFVKFKRNPKENPLSQFLEGEILSASKMLSKFRKIIKEEINDIKDTDVIMKRKRGGSPAVTLLISEKISVDITLALESKSSWPASTQEGLRIQNWLSAKVRKQLRLKPFYLVPKHAKEGNGFQEETWRLSFSHIEKEILNNHGKSKTCCENKEEKCCRKDCLKLMKYLLEQLKERFKDKKHLDKFSSYHVKTAFFHVCTQNPQDSQWDRKDLGLCFDNCVTYFLQCLRTEKLENYFIPEFNLFSSNLIDKRSKEFLTKQIEYERNNEFPVFDEF

SEQ ID NO: 1255 - DNA, 1569 bp, Homo sapiens
atgcaaccatggcatggtaaggcaatgcaacgtgcatctgaggctggagctaccgcgcccaaagcttcagcacggaacgcgcgcggtgctccgatggatccgacggagagccctgctgcaccggaagccgctctgccaaaagcgggtaaattcgggccggcgcggaaatcaggctcacgccagaaaaagagtgctccggatacacaggaacgtccgcctgtaagagctaccggcgcgcgcgctaaaaaagcccctcagcgtgcgcaggatacccaaccatcggatgcaacgagcgcaccgggggcggagggccttgagcctcctgctgcgcgtgagccggccctctctcgcgcagggagttgccgccaacgaggcgcacgctgctcgacgaaaccgcggccccctccgggtccgtgggatgttccatcgccaggcctgccggtttctgcgcctattctcgttcgccgcgacgcggctcctggcgcttcgaaactgagagctgtcttagagaaactgaaactctcgcgggatgatatatctactgcggcagggatggtcaaaggtgttgtggatcatctcctgttacgtcttaagtgcgattcggccttccgaggtgttggccttttaaacactgggtcatactatgagcacgttaagatcagcgcgccgaacgagttcgacgttatgtttaagcttgaagtccctcgcatacagctggaagaatactccaatacacgagcatattattttgttaaattcaaacgaaaccccaaagagaaccctctttcacagtttctggagggagaaattctgtctgcgagtaagatgctctcgaagttccgaaaaatcattaaagaggaaatcaacgacatcaaagacactgatgttatcatgaagaggaaacgtgggggctcaccggcggtaacactgctgatttcggaaaagatctcagttgatattactttggcgctcgaatcaaaatcatcgtggccggcgagtacacaggaagggctccgtattcagaattggctgtctgcgaaagtccgcaaacaactgcgtttgaaaccattttatttagtgccaaaacacgcgaaagaaggcaacggtttccaggaggagacgtggcgactgtcatttagccacatagaaaaggaaatattaaataatcacgggaaaagtaagacgtgctgcgagaataaagaagagaagtgctgcaggaaagattgtctgaaactgatgaaatacctgttggagcagctgaaagagaggtttaaagataagaagcatctggacaaattttcttcatatcacgttaaaaccgcattcttccacgtatgcacacagaatccgcaggactcacagtgggatcggaaagatctgggcctgtgctttgacaactgcgtcacatatttcttgcagtgcttgaggactgaaaaattggaaaactacttcattcccgagttcaatttattcagtagtaacctgatcgacaagcgtagcaaagaattcctgacgaagcagatcgaatacgaaagaaataacgaattcccggtgtttgatgaattttaa

SEQ ID NO: 1256 - DNA, 1594 bp, Artificial Sequence
  source: /note="Description of Artificial Sequence: Synthetic polynucleotide"
acctattggtataaggaggtaaataatgcaaccatggcatggtaaggcaatgcaacgtgcatctgaggctggagctaccgcgcccaaagcttcagcacggaacgcgcgcggtgctccgatggatccgacggagagccctgctgcaccggaagccgctctgccaaaagcgggtaaattcgggccggcgcggaaatcaggctcacgccagaaaaagagtgctccggatacacaggaacgtccgcctgtaagagctaccggcgcgcgcgctaaaaaagcccctcagcgtgcgcaggatacccaaccatcggatgcaacgagcgcaccgggggcggagggccttgagcctcctgctgcgcgtgagccggccctctctcgcgcagggagttgccgccaacgaggcgcacgctgctcgacgaaaccgcggccccctccgggtccgtgggatgttccatcgccaggcctgccggtttctgcgcctattctcgttcgccgcgacgcggctcctggcgcttcgaaactgagagctgtcttagagaaactgaaactctcgcgggatgatatatctactgcggcagggatggtcaaaggtgttgtggatcatctcctgttacgtcttaagtgcgattcggccttccgaggtgttggccttttaaacactgggtcatactatgagcacgttaagatcagcgcgccgaacgagttcgacgttatgtttaagcttgaagtccctcgcatacagctggaagaatactccaatacacgagcatattattttgttaaattcaaacgaaaccccaaagagaaccctctttcacagtttctggagggagaaattctgtctgcgagtaagatgctctcgaagttccgaaaaatcattaaagaggaaatcaacgacatcaaagacactgatgttatcatgaagaggaaacgtgggggctcaccggcggtaacactgctgatttcggaaaagatctcagttgatattactttggcgctcgaatcaaaatcatcgtggccggcgagtacacaggaagggctccgtattcagaattggctgtctgcgaaagtccgcaaacaactgcgtttgaaaccattttatttagtgccaaaacacgcgaaagaaggcaacggtttccaggaggagacgtggcgactgtcatttagccacatagaaaaggaaatattaaataatcacgggaaaagtaagacgtgctgcgagaataaagaagagaagtgctgcaggaaagattgtctgaaactgatgaaatacctgttggagcagctgaaagagaggtttaaagataagaagcatctggacaaattttcttcatatcacgttaaaaccgcattcttccacgtatgcacacagaatccgcaggactcacagtgggatcggaaagatctgggcctgtgctttgacaactgcgtcacatatttcttgcagtgcttgaggactgaaaaattggaaaactacttcattcccgagttcaatttattcagtagtaacctgatcgacaagcgtagcaaagaattcctgacgaagcagatcgaatacgaaagaaataacgaattcccggtgtttgatgaattttaa

SEQ ID NO: 1257 - protein, 273 aa, Listeria monocytogenes; identical to SEQ ID NO: 1209

SEQ ID NO: 1258 - DNA, 822 bp, Listeria monocytogenes; identical to SEQ ID NO: 1210

SEQ ID NO: 1259 - DNA, 3787 bp, Artificial Sequence; identical to SEQ ID NO: 1211
  source: /note="Description of Artificial Sequence: Synthetic polynucleotide"

SEQ ID NO: 1260 - protein, 403 aa, Kingella denitrificans
MSDYTNNLHRVFVDQKIGFKKKITPTEQDLNFFNQVKKDVKSHLKTKIKEFLEQQGIANIAPKFRIQGSWAYGTCNLPAKQDQEMDFDYGVYLPVRAFEGFNPDAGASEQAQNYFEQVELMVEDLCHQHKWQLDTSAPSSCIRIKIRSNAHMDIPLYAVPDDMFDSLEERNELQVSLGTTTAIDKSLNYSEWALEDFNIRSFAEESLMDKNIRMIHMARRDGTWQKSDCELIRKWFADKLKSLENNGQQLRAICRYLKAWRDWQFADKSFQPSSILLMIIACKYYQYHQHRDDLALLSVLEKLPNALNDNVYENIEEHESEDFNRMEEYERVEASQYADALYQSFMASLNNLDKTKVLNFITNEWGDRIPQDENLIETSPQSIFDTPPLAQSNITQQVPLRQG

SEQ ID NO: 1261 - protein, 403 aa, Neisseria bacilliformis
MSHYTNNLHRIFVDREIGFKKEITPTELDLDFFNNVKKVVKSHLKTKIKEFLEQQGLASITPKFRIQGSWAYGTCNLPAKQGQEMDFDYGVYLPVRAFDGFNPDAGASEQAKNYFEQVELMMGDLCEQHDWLLDTSAPSSCIRIKIRNNAHMDIPLYAVPDDMFDSLEERNELQVSLGSATAIHESLNYSKWVFEDFNIRSFAEESLMDKNIRMIHMARRDGTWQESDCELIRKWFADKLKSLENNGQQLRAICRYLKAWRDWQFADKSFQPSSILLMIIACKYYQYYQHRDDLALLSVLEKLPNALSGNVYENIEEHESEDFNRMKEGERVEAMQYADALYQNFMASLNNFDKTKALKFITNEWGNRIPQDEDLIETSRQAIFDTPPLVQPNITPQAPLRQG

SEQ ID NO: 1262 - protein, 468 aa, Verminephrobacter eiseniae
MGQASKLFNGNTDQTLIGRVTPTTEQREFLQQQWNDLADHLKQALAKHGYTISTWLQGSYKYATLIKPVHLGEEYDVDVGLYFEWNDDQDAEPTPKQLRDWVQAELLEYEKACEELKKVEVPPKERCSRASYIQQFHIDTPVYHLNTDSDVRRLACLSGKWEHSDPKKLYKWFKEAVSGDDRDQLRRLVRYLKAWAAVSFDDAPGSRPSSIFLTVIATEAYQDLWAQRLLGLADDDALLAVIKKMHDRLFDDRKVENPVDKNEDLNRMTAEAWDGFLPRLAALQDIAERAGDAKDEASAALIWSEAFSFLMPLPETDQVEIVDEGSGRAVMQLPEIEVKVCTGTPPRPVATYRNEVPGVAKDCMLSFAIVNPHVVPEFATVEWTVRNEGQEADQRSDLGHRRVGMRLLSVEEHTAYVGRHFMDCVVRLNGQVYAVRRVPVTIRDVQHVARNPPRPPYTKLRSLFRRRR

SEQ ID NO: 1263 - DNA, 1213 bp, Kingella denitrificans
atgtcagactacactaataacttgcatcgcgtctttgttgaccaaaaaattgggttcaagaagaaaatcactcctaccgagcaagatctgaactttttcaatcaggtcaagaaagatgtaaagtcccaccttaagaccaaaatcaaggaatttcttgagcaacagggaatcgcgaacattgctccgaagttccgtattcagggatcgtgggcttacgggacatgtaatttgcccgcaaaacaggaccaggagatggatttcgattacggggtatatctgccagtacgtgccttcgaggggttcaacccagacgcaggcgcgtctgagcaggctcaaaactattttgaacaggtcgagttgatggttgaagatctgtgccaccagcataaatggcagctggacacgtctgccccttcgtcctgtatccgcattaaaattcgcagcaacgctcatatggacattcctttatatgccgtcccggatgatatgttcgattctcttgaagagcgcaatgagttacaagtatcactgggcacgacaacggctatcgataagtcactgaattacagcgagtgggcactggaggactttaatatccgctcattcgccgaagaaagtttaatggataagaacattcgcatgatccacatggcgcgtcgtgacgggacttggcaaaagtcggattgcgagctgattcgcaaatggttcgcagacaaactgaagagcttggagaataacgggcaacagctgcgtgcgatctgtcgttaccttaaggcgtggcgcgattggcaattcgctgacaagtcgtttcaaccatcctctatcttgttaatgattatcgcgtgcaaatattatcaataccatcaacaccgtgacgatttagcacttttatccgtgcttgaaaagttgccaaacgctttaaacgataatgtttatgagaatattgaagaacacgaatccgaagactttaaccgtatggaagagtatgaacgcgttgaggcgtcgcagtatgccgacgcgttgtaccagagtttcatggcctccttaaacaatttggacaaaactaaggttttaaattttatcactaatgagtggggggatcgcattccacaagacgagaacttaatcgagacatctcctcaatcaattttcgatactccccccttggcacaaagcaatatcacgcaacaagtgcccttgcgccagggttaas

SEQ ID NO: 1264 - DNA, 1212 bp, Neisseria bacilliformis
atgtctcactacaccaataatcttcatcgtatcttcgtagatcgtgaaattggttttaagaaagagattactccgacagagctggatcttgacttcttcaacaacgtcaaaaaagtagttaagagccaccttaaaaccaaaatcaaggagtttcttgaacagcaagggctggcgagtattactcctaagtttcgtatccagggaagctgggcgtacggaacatgtaaccttccagccaagcagggtcaggaaatggacttcgattatggcgtttatcttcctgtccgcgcctttgatggatttaatcctgatgcaggtgcctcagaacaagctaagaattacttcgaacaggtggagcttatgatgggtgacctgtgcgagcagcatgactggttgttggacacatccgcgccctcttcgtgtattcgcatcaaaatccgcaataatgcccatatggacattcctttatatgcagttccagacgatatgttcgatagcctggaggaacgtaacgaattacaggtttccttgggatcagcgacagctattcacgaatcgctgaattattcaaagtgggtttttgaggattttaacatccgctcttttgctgaggaatccctgatggacaaaaatatccgcatgatccacatggcccgccgtgacggaacttggcaggagtctgattgtgagttgattcgcaaatggtttgctgacaagttgaaatcccttgagaataatggtcagcagcttcgtgcaatttgtcgctatcttaaagcctggcgcgattggcaattcgcagataagtcttttcaaccctccagtatcctgttgatgatcattgcgtgtaagtactatcagtactaccaacatcgtgacgacctggcactgctgtccgtgctggagaaattgcccaacgctttgtctgggaacgtctatgagaatattgaggaacatgagtctgaggactttaaccgtatgaaagagggcgagcgtgtagaagcaatgcaatatgcggacgcgttataccaaaacttcatggcgtctcttaacaattttgataaaacgaaggcgctgaaattcatcactaatgaatggggaaatcgtatcccacaagatgaagacttaatcgaaacgtctcgtcaggcaatttttgacacaccacccttagttcaacccaacatcactccacaggccccacttcgccaggggtaa

SEQ ID NO: 1265 - DNA, 1407 bp, Verminephrobacter eiseniae
atgggacaggcgtctaagttatttaatggtaatacagatcaaactttaattggccgcgtgacgcccactaccgaacaacgcgagtttttacaacagcagtggaatgatctggcagatcacttgaagcaagccctggcaaaacacggttatacaatttcgacatggcttcagggttcttacaaatacgcgactcttattaagcctgtgcatctgggtgaagagtatgacgtagatgtagggttgtactttgagtggaacgatgaccaggatgcggagcccacgcctaagcagctgcgtgattgggtgcaagcggagttgttagagtatgagaaggcttgtgaggaacttaagaaagttgaggtgccgccgaaagaacgctgttctcgcgcatcatacatccaacaatttcacattgacacaccagtttatcatctgaacacggactccgacgtgcgccgtcttgcttgccttagtggaaagtgggagcattctgatccgaaaaagttatacaagtggtttaaagaagcagtatccggggatgatcgtgaccaattacgccgtcttgtacgttacttaaaggcctgggctgcggtttcctttgatgacgcaccgggatcccgcccatctagcatttttcttacggttattgctactgaagcctatcaggacttgtgggcacaacgtttactgggattagctgacgatgacgctttgctggcagtgattaaaaagatgcacgaccgccttttcgatgaccgcaaggtcgagaatcccgtagataaaaacgaagacttaaatcgcatgacggctgaagcgtgggacggttttctgccccgcttggcggcacttcaagacattgcggaacgcgccggagatgctaaggatgaggcgtcagccgcattgatctggagcgaagcgtttagttttttgatgcccttgccggaaactgatcaggtagaaatcgtagacgaaggctcaggccgtgccgtcatgcaattgccagaaattgaggtaaaggtctgcactggcacgccaccccgcccagtcgcaacgtatcgtaatgaggtcccaggagtagcaaaagactgcatgttgtcctttgcgattgtcaatccacatgtggttccggagtttgccacggtggagtggactgtgcgtaatgagggacaggaggcggaccagcgtagtgatttagggcaccgtcgcgtcgggatgcgtttgttgagtgtagaggaacatacggcatatgtcggtcgtcactttatggattgtgtagtccgtctgaacgggcaagtttacgctgtccgtcgcgtacccgttaccattcgcgacgttcagcacgtcgcccgcaatcccccacgtccaccttacacaaaactgcgcagtttattccgccgccgtcgctaa

SEQ ID NO: 1266 - DNA, 4045 bp, Artificial Sequence
  source: /note="Description of Artificial Sequence: Synthetic polynucleotide"
tagcggagtgtatactggcttactatgttggcactgatgagggtgtcagtgaagtgcttcatgtggcaggagaaaaaaggctgcaccggtgcgtcagcagaatatgtgatacaggatatattccgcttcctcgctcactgactcgctacgctcggtcgttcgactgcggcgagcggaaatggcttacgaacggggcggagatttcctggaagatgccaggaagatacttaacagggaagtgagagggccgcggcaaagccgtttttccataggctccgcccccctgacaagcatcacgaaatctgacgctcaaatcagtggtggcgaaacccgacaggactataaagataccaggcgtttcccctggcggctccctcgtgcgctctcctgttcctgcctttcggtttaccggtgtcattccgctgttatggccgcgtttgtctcattccacgcctgacactcagttccgggtaggcagttcgctccaagctggactgtatgcacgaaccccccgttcagtccgaccgctgcgccttatccggtaactatcgtcttgagtccaacccggaaagacatgcaaaagcaccactggcagcagccactggtaattgatttagaggagttagtcttgaagtcatgcgccggttaaggctaaactgaaaggacaagttttggtgactgcgctcctccaagccagttacctcggttcaaagagttggtagctcagagaaccttcgaaaaaccgccctgcaaggcggttttttcgttttcagagcaagagattacgcgcagaccaaaacgatctcaagaagatcatcttattaaggggtctgacgctcagtggaacggtgcaccctgcagggctagctgataaagcgttcgcgctgcattcggcagtacatgtctaacgtttgaattttgcgtaacgttcgcgagcaatctctaaagtgctattacgtacacgctcaaaacgttccttatccttctgccataacgaacgcaccgcaagaccacgcacgctgttaaaaatcaaccacaaaatgtcctcggcatcgtcacgggataatccacgcgacaccagaacgcccaaccacatatcctcgaccacaaaacggttgcgctctaccgtgcgttggataccctcacgcagagctggatcacgatcagcggccacaatcagatcaaggctaattgaaaagtcgtcatccaagaaaaactcagcggcatcatcaagcatttgctgaatcacatcatcttccggttttaacttagccaggcgagcacggctgcgctcggtgatctgctcatacagccactcaaacgtagcaagcaacagttctaatttggtgggaaaatggtgtgactgggcgccacgagacacccccgcggcgcccggtacatccgcaatacgaaaacccgcgtatcccttctcgcgtaatacaccaagcgccgccgcgatcagtttaccttgtgtttccatcgcacgttcggcttgagtacggcgcttgggcgacatgattaccatcttgcgaaacgatcctcatcctgtctcttgatcagatcttgatcccctgcgccatcagatccttggcggcaagaaagccatccagtttactttgcagggcttcccaaccttaccagagggcgccccagctggcaattccggacgcgttgcgcctagggggaatggtccatgcctgcagtaacaccgtgcgtgttgactattttacctctggcggtgataatggttgcaacaaacagacaatctggtctgtttgtattatgttaaccagcacactggcggccgcttactagaaataattttggccgcatcccacgctaactaatataaaggaggttttaaatggacttttccaacatgagtatccttcactatttagcgaatattgtagacattttggtggtttggttcgtaatttacaaggttatcatgcttattcgcggcacgaaagccgtccagctgttgaaggggattttcattattattgccgtcaagttacttagcggcttcttcggattgcagacagtggaatggattactgatcaaatgctgacttggggtttcttagccattatcattatctttcaaccggaattgcgtcgtgccctggagactttggggcgtggcaatatctttacccgctatggatcacgcattgagcgtgaacaacaccaccttattgagtctattgaaaagtccacgcaatacatggcgaagcgtcgcattggagctttgatctctgtggctcgtgatacaggcatggacgactacatcgagactggcattccgcttaatgcgaaaatctcatcgcaattattgattaatatcttcatccccaatacccctcttcacgatggcgccgtgatcattaaaggtaacgagatcgcgagcgctgccagttatctgccattgtccgactcgccgtttctttctaaggagctgggaactcgccatcgtgccgcattagggatttccgaggtgacagattcaatcacaatcgttgtcagcgaggaaacaggtgggatttcccttacgaagggaggcgaactgttccgtgatgtatccgaagaagaattgcataagattttgcttaaagagctggtgactgtcacagctaaaaaaccaagcattttctccaaatggaaaggaggtaagtccgagtgatgagcatgctaatcagccgtggaattcggtctcaggaggaacgattggtaaacccggtgaacgcatgagaaagcccccggaagatcaccttccgggggcttttttattgcgcggaccaaaacgaaaaaagacgctcgaaagcgtctcttttctggaatttggtaccgaggcgtaatgctctgccagtgttacaaccaattaaccaattctgattagaaaaactcatcgagcatcaaatgaaactgcaatttattcatatcaggattatcaataccatatttttgaaaaagccgtttctgtaatgaaggagaaaactcaccgaggcagttccataggatggcaagatcctggtatcggtctgcgattccgactcgtccaacatcaatacaacctattaatttcccctcgtcaaaaataaggttatcaagtgagaaatcaccatgagtgacgactgaatccggtgagaatggcaaaagcttatgcatttctttccagacttgttcaacaggccagccattacgctcgtcatcaaaatcactcgcatcaaccaaaccgttattcattcgtgattgcgcctgagcgagacgaaatacgcgatcgctgttaaaaggacaattacaaacaggaatcgaatgcaaccggcgcaggaacactgccagcgcatcaacaatattttcacctgaatcaggatattcttctaatacctggaatgctgttttcccggggatcgcagtggtgagtaaccatgcatcatcaggagtacggataaaatgcttgatggtcggaagaggcataaattccgtcagccagtttagtctgaccatctcatctgtaacatcattggcaacgctacctttgccatgtttcagaaacaactctggcgcatcgggcttcccatacaatcgatagattgtcgcacctgattgcccgacattatcgcgagcccatttatacccatataaatcagcatccatgttggaatttaatcgcggcctcgagcaagacgtttcccgttgaatatggctcataacaccccttgtattactgtttatgtaagcagacagttttattgttcatgatgatatatttttatcttgtgcaatgtaacatcagagattttgagacacaacgtggctttgttgaataaatcgaacttttgctgagttgaaggatcagatcacgcatcttcccgacaacgcagaccgttccgtggcaaagcaaaagttcaaaatcaccaactggtccacctacaacaaagctctcatcaaccgtggctccctcactttctggctggatgatggggcgattcaggcctggtatgagtcagcaacaccttcttcacgaggcagacctcagcgc

SEQ ID NO: 1267 - DNA, 141 bp, Artificial Sequence
  source: /note="Description of Artificial Sequence: Synthetic polynucleotide"
cttgcgaaacgatcctcatcctgtctcttgatcagatcttgatcccctgcgccatcagatccttggcggcaagaaagccatccagtttactttgcagggcttcccaaccttaccagagggcgccccagctggcaattccgg

SEQ ID NO: 1268 - DNA, 621 bp, Artificial Sequence
  source: /note="Description of Artificial Sequence: Synthetic polynucleotide"
ctaacgtttgaattttgcgtaacgttcgcgagcaatctctaaagtgctattacgtacacgctcaaaacgttccttatccttctgccataacgaacgcaccgcaagaccacgcacgctgttaaaaatcaaccacaaaatgtcctcggcatcgtcacgggataatccacgcgacaccagaacgcccaaccacatatcctcgaccacaaaacggttgcgctctaccgtgcgttggataccctcacgcagagctggatcacgatcagcggccacaatcagatcaaggctaattgaaaagtcgtcatccaagaaaaactcagcggcatcatcaagcatttgctgaatcacatcatcttccggttttaacttagccaggcgagcacggctgcgctcggtgatctgctcatacagccactcaaacgtagcaagcaacagttctaatttggtgggaaaatggtgtgactgggcgccacgagacacccccgcggcgcccggtacatccgcaatacgaaaacccgcgtatcccttctcgcgtaatacaccaagcgccgccgcgatcagtttaccttgtgtttccatcgcacgttcggcttgagtacggcgcttgggcgacatgattaccat

SEQ ID NO: 1269 - protein, 206 aa, Artificial Sequence
  source: /note="Description of Artificial Sequence: Synthetic polypeptide"
MVIMSPKRRTQAERAMETQGKLIAAALGVLREKGYAGFRIADVPGAAGVSRGAQSHHFPTKLELLLATFEWLYEQITERSRARLAKLKPEDDVIQQMLDDAAEFFLDDDFSISLDLIVAADRDPALREGIQRTVERNRFVVEDMWLGVLVSRGLSRDDAEDILWLIFNSVRGLAVRSLWQKDKERFERVRNSTLEIARERYAKFKR

SEQ ID NO: 1270 - DNA, 123 bp, Escherichia coli
taacaccgtgcgtgttgactattttacctctggcggtgataatggttgcaacaaacagacaatctggtctgtttgtattatgttaaccagcacactggcggccgcttactagaaataattttg

SEQ ID NO: 1271 - DNA, 161 bp, Artificial Sequence
  source: /note="Description of Artificial Sequence: Synthetic polynucleotide"
taacaccgtgcgtgttgactattttacctctggcggtgataatggttgcaacaaacagacaatctggtctgtttgtattatgttaaccagcacactggcggccgcttactagaaataattttggccgcatcccacgctaactaatataaaggaggttttaa

SEQ ID NO: 1272 - DNA, 983 bp, Artificial Sequence
  source: /note="Description of Artificial Sequence: Synthetic polynucleotide"
taacaccgtgcgtgttgactattttacctctggcggtgataatggttgcaacaaacagacaatctggtctgtttgtattatgttaaccagcacactggcggccgcttactagaaataattttggccgcatcccacgctaactaatataaaggaggttttaaatggacttttccaacatgagtatccttcactatttagcgaatattgtagacattttggtggtttggttcgtaatttacaaggttatcatgcttattcgcggcacgaaagccgtccagctgttgaaggggattttcattattattgccgtcaagttacttagcggcttcttcggattgcagacagtggaatggattactgatcaaatgctgacttggggtttcttagccattatcattatctttcaaccggaattgcgtcgtgccctggagactttggggcgtggcaatatctttacccgctatggatcacgcattgagcgtgaacaacaccaccttattgagtctattgaaaagtccacgcaatacatggcgaagcgtcgcattggagctttgatctctgtggctcgtgatacaggcatggacgactacatcgagactggcattccgcttaatgcgaaaatctcatcgcaattattgattaatatcttcatccccaatacccctcttcacgatggcgccgtgatcattaaaggtaacgagatcgcgagcgctgccagttatctgccattgtccgactcgccgtttctttctaaggagctgggaactcgccatcgtgccgcattagggatttccgaggtgacagattcaatcacaatcgttgtcagcgaggaaacaggtgggatttcccttacgaagggaggcgaactgttccgtgatgtatccgaagaagaattgcataagattttgcttaaagagctggtgactgtcacagctaaaaaaccaagcattttctccaaatggaaaggaggtaagtccgagtga

SEQ ID NO: 1273 - DNA, 79 bp, Artificial Sequence
  source: /note="Description of Artificial Sequence: Synthetic oligonucleotide"
tgtatttatcaatattgtttgctccgttatcgttattaacaagtcatcaataaagccatcacgagtaccatagaggatc

SEQ ID NO: 1274 - DNA, 117 bp, Artificial Sequence
  source: /note="Description of Artificial Sequence: Synthetic polynucleotide"
tgtatttatcaatattgtttgctccgttatcgttattaacaagtcatcaataaagccatcacgagtaccatagaggatcgccgcatcccacgctaactaatataaaggaggttttaa

SEQ ID NO: 1275 - DNA, 939 bp, Artificial Sequence
  source: /note="Description of Artificial Sequence: Synthetic polynucleotide"
tgtatttatcaatattgtttgctccgttatcgttattaacaagtcatcaataaagccatcacgagtaccatagaggatcgccgcatcccacgctaactaatataaaggaggttttaaatggacttttccaacatgagtatccttcactatttagcgaatattgtagacattttggtggtttggttcgtaatttacaaggttatcatgcttattcgcggcacgaaagccgtccagctgttgaaggggattttcattattattgccgtcaagttacttagcggcttcttcggattgcagacagtggaatggattactgatcaaatgctgacttggggtttcttagccattatcattatctttcaaccggaattgcgtcgtgccctggagactttggggcgtggcaatatctttacccgctatggatcacgcattgagcgtgaacaacaccaccttattgagtctattgaaaagtccacgcaatacatggcgaagcgtcgcattggagctttgatctctgtggctcgtgatacaggcatggacgactacatcgagactggcattccgcttaatgcgaaaatctcatcgcaattattgattaatatcttcatccccaatacccctcttcacgatggcgccgtgatcattaaaggtaacgagatcgcgagcgctgccagttatctgccattgtccgactcgccgtttctttctaaggagctgggaactcgccatcgtgccgcattagggatttccgaggtgacagattcaatcacaatcgttgtcagcgaggaaacaggtgggatttcccttacgaagggaggcgaactgttccgtgatgtatccgaagaagaattgcataagattttgcttaaagagctggtgactgtcacagctaaaaaaccaagcattttctccaaatggaaaggaggtaagtccgagtga

SEQ ID NO: 1276 - DNA, 1918 bp, Artificial Sequence
  source: /note="Description of Artificial Sequence: Synthetic polynucleotide"
tcaatctgtaaacaaatcgaacatcagttgacgaagccagatattggccaaatccttatggtatttagcgtgccagaacatattaatggcaatctcgggaagcactaccggatgaggcagagcggacaagccgaaaggttcgacacagcaatccgctaagcggatcggcactgttgccagcaggtcagtacgttgaagaatatggccaacggctgcgaaatggggcacttccagacgaatatcacgacggatgcctacacgggtcatatacgtgtccacttcaccgtggcctgtgcctgctgcaataacacgtacatgtccataactacaaaagcgttcaagcgtcaatggctcacgggtaacggggtggtccttgcggcacaaacaaacgtagtggttttgcagtaaacggcgttggaagaagcctgtttgaaggttgggcagaagccccaccgccaaatcgacagttccattttgcaacgcctgcattaatgacatagacgaatcgcggacagtagaaatgacgcagttcggtgcttgatgggcaagtacgtccatcaggcgaggcatgaaataaatctccccaatatccgtcattgccagggtgaaagtacgctccgaagtaagggggtcaaagctctcatgatgttgtaaagcgttacgaagggcgtgcatggcactggtgacaggctcggccaagtgtgcggcgtatggcgttggttccatcccttggtgagtacggacgaacaacggatcttgtaacgatgtacgaaggcgttttaatgcgttagaaactgcgggttgagtaagcccaagattttctgcggtgatggagacgcgacgatctaccagcagctgattaaagacaactaacaggttaaggtccagatcacgcaattccatggggcctcgcttgggttattgctggtgcccggccgggcgcaatattcatgttgatgatttattatatatcgagtggtgtatttatcaatattgtttgctccgttatcgttattaacaagtcatcaataaagccatcacgagtaccatagaggatcgccgcatcccacgctaactaatataaaggaggttttaaatggacttttccaacatgagtatccttcactatttagcgaatattgtagacattttggtggtttggttcgtaatttacaaggttatcatgcttattcgcggcacgaaagccgtccagctgttgaaggggattttcattattattgccgtcaagttacttagcggcttcttcggattgcagacagtggaatggattactgatcaaatgctgacttggggtttcttagccattatcattatctttcaaccggaattgcgtcgtgccctggagactttggggcgtggcaatatctttacccgctatggatcacgcattgagcgtgaacaacaccaccttattgagtctattgaaaagtccacgcaatacatggcgaagcgtcgcattggagctttgatctctgtggctcgtgatacaggcatggacgactacatcgagactggcattccgcttaatgcgaaaatctcatcgcaattattgattaatatcttcatccccaatacccctcttcacgatggcgccgtgatcattaaaggtaacgagatcgcgagcgctgccagttatctgccattgtccgactcgccgtttctttctaaggagctgggaactcgccatcgtgccgcattagggatttccgaggtgacagattcaatcacaatcgttgtcagcgaggaaacaggtgggatttcccttacgaagggaggcgaactgttccgtgatgtatccgaagaagaattgcataagattttgcttaaagagctggtgactgtcacagctaaaaaaccaagcattttctccaaatggaaaggaggtaagtccgagtga

SEQ ID NO: 1277 - DNA, 4203 bp, Artificial Sequence
  source: /note="Description of Artificial Sequence: Synthetic polynucleotide"
tagcggagtgtatactggcttactatgttggcactgatgagggtgtcagtgaagtgcttcatgtggcaggagaaaaaaggctgcaccggtgcgtcagcagaatatgtgatacaggatatattccgcttcctcgctcactgactcgctacgctcggtcgttcgactgcggcgagcggaaatggcttacgaacggggcggagatttcctggaagatgccaggaagatacttaacagggaagtgagagggccgcggcaaagccgtttttccataggctccgcccccctgacaagcatcacgaaatctgacgctcaaatcagtggtggcgaaacccgacaggactataaagataccaggcgtttcccctggcggctccctcgtgcgctctcctgttcctgcctttcggtttaccggtgtcattccgctgttatggccgcgtttgtctcattccacgcctgacactcagttccgggtaggcagttcgctccaagctggactgtatgcacgaaccccccgttcagtccgaccgctgcgccttatccggtaactatcgtcttgagtccaacccggaaagacatgcaaaagcaccactggcagcagccactggtaattgatttagaggagttagtcttgaagtcatgcgccggttaaggctaaactgaaaggacaagttttggtgactgcgctcctccaagccagttacctcggttcaaagagttggtagctcagagaaccttcgaaaaaccgccctgcaaggcggttttttcgttttcagagcaagagattacgcgcagaccaaaacgatctcaagaagatcatcttattaaggggtctgacgctcagtggaacggtgcaccctgcagggctagctgataaagcgttcgcgctgcattcggcagttcaatctgtaaacaaatcgaacatcagttgacgaagccagatattggccaaatccttatggtatttagcgtgccagaacatattaatggcaatctcgggaagcactaccggatgaggcagagcggacaagccgaaaggttcgacacagcaatccgctaagcggatcggcactgttgccagcaggtcagtacgttgaagaatatggccaacggctgcgaaatggggcacttccagacgaatatcacgacggatgcctacacgggtcatatacgtgtccacttcaccgtggcctgtgcctgctgcaataacacgtacatgtccataactacaaaagcgttcaagcgtcaatggctcacgggtaacggggtggtccttgcggcacaaacaaacgtagtggttttgcagtaaacggcgttggaagaagcctgtttgaaggttgggcagaagccccaccgccaaatcgacagttccattttgcaacgcctgcattaatgacatagacgaatcgcggacagtagaaatgacgcagttcggtgcttgatgggcaagtacgtccatcaggcgaggcatgaaataaatctccccaatatccgtcattgccagggtgaaagtacgctccgaagtaagggggtcaaagctctcatgatgttgtaaagcgttacgaagggcgtgcatggcactggtgacaggctcggccaagtgtgcggcgtatggcgttggttccatcccttggtgagtacggacgaacaacggatcttgtaacgatgtacgaaggcgttttaatgcgttagaaactgcgggttgagtaagcccaagattttctgcggtgatggagacgcgacgatctaccagcagctgattaaagacaactaacaggttaaggtccagatcacgcaattccatggggcctcgcttgggttattgctggtgcccggccgggcgcaatattcatgttgatgatttattatatatcgagtggtgtatttatcaatattgtttgctccgttatcgttattaacaagtcatcaataaagccatcacgagtaccatagaggatcgccgcatcccacgctaactaatataaaggaggttttaaatggacttttccaacatgagtatccttcactatttagcgaatattgtagacattttggtggtttggttcgtaatttacaaggttatcatgcttattcgcggcacgaaagccgtccagctgttgaaggggattttcattattattgccgtcaagttacttagcggcttcttcggattgcagacagtggaatggattactgatcaaatgctgacttggggtttcttagccattatcattatctttcaaccggaattgcgtcgtgccctggagactttggggcgtggcaatatctttacccgctatggatcacgcattgagcgtgaacaacaccaccttattgagtctattgaaaagtccacgcaatacatggcgaagcgtcgcattggagctttgatctctgtggctcgtgatacaggcatggacgactacatcgagactggcattccgcttaatgcgaaaatctcatcgcaattattgattaatatcttcatccccaatacccctcttcacgatggcgccgtgatcattaaaggtaacgagatcgcgagcgctgccagttatctgccattgtccgactcgccgtttctttctaaggagctgggaactcgccatcgtgccgcattagggatttccgaggtgacagattcaatcacaatcgttgtcagcgaggaaacaggtgggatttcccttacgaagggaggcgaactgttccgtgatgtatccgaagaagaattgcataagattttgcttaaagagctggtgactgtcacagctaaaaaaccaagcattttctccaaatggaaaggaggtaagtccgagtgaggaggaacgattggtaaacccggtgtaataagcatgctaatcagccgtggaattcggtctcaggaggaacgattggtaaacccggtgaacgcatgagaaagcccccggaagatcaccttccgggggcttttttattgcgcggaccaaaacgaaaaaagacgctcgaaagcgtctcttttctggaatttggtaccgaggcgtaatgctctgccagtgttacaaccaattaaccaattctgattagaaaaactcatcgagcatcaaatgaaactgcaatttattcatatcaggattatcaataccatatttttgaaaaagccgtttctgtaatgaaggagaaaactcaccgaggcagttccataggatggcaagatcctggtatcggtctgcgattccgactcgtccaacatcaatacaacctattaatttcccctcgtcaaaaataaggttatcaagtgagaaatcaccatgagtgacgactgaatccggtgagaatggcaaaagcttatgcatttctttccagacttgttcaacaggccagccattacgctcgtcatcaaaatcactcgcatcaaccaaaccgttattcattcgtgattgcgcctgagcgagacgaaatacgcgatcgctgttaaaaggacaattacaaacaggaatcgaatgcaaccggcgcaggaacactgccagcgcatcaacaatattttcacctgaatcaggatattcttctaatacctggaatgctgttttcccggggatcgcagtggtgagtaaccatgcatcatcaggagtacggataaaatgcttgatggtcggaagaggcataaattccgtcagccagtttagtctgaccatctcatctgtaacatcattggcaacgctacctttgccatgtttcagaaacaactctggcgcatcgggcttcccatacaatcgatagattgtcgcacctgattgcccgacattatcgcgagcccatttatacccatataaatcagcatccatgttggaatttaatcgcggcctcgagcaagacgtttcccgttgaatatggctcataacaccccttgtattactgtttatgtaagcagacagttttattgttcatgatgatatatttttatcttgtgcaatgtaacatcagagattttgagacacaacgtggctttgttgaataaatcgaacttttgctgagttgaaggatcagatcacgcatcttcccgacaacgcagaccgttccgtggcaaagcaaaagttcaaaatcaccaactggtccacctacaacaaagctctcatcaaccgtggctccctcactttctggctggatgatggggcgattcaggcctggtatgagtcagcaacaccttcttcacgaggcagacctcagcgc

SEQ ID NO: 1278 - DNA, 903 bp, Pseudomonas sp.
tcaatctgtaaacaaatcgaacatcagttgacgaagccagatattggccaaatccttatggtatttagcgtgccagaacatattaatggcaatctcgggaagcactaccggatgaggcagagcggacaagccgaaaggttcgacacagcaatccgctaagcggatcggcactgttgccagcaggtcagtacgttgaagaatatggccaacggctgcgaaatggggcacttccagacgaatatcacgacggatgcctacacgggtcatatacgtgtccacttcaccgtggcctgtgcctgctgcaataacacgtacatgtccataactacaaaagcgttcaagcgtcaatggctcacgggtaacggggtggtccttgcggcacaaacaaacgtagtggttttgcagtaaacggcgttggaagaagcctgtttgaaggttgggcagaagccccaccgccaaatcgacagttccattttgcaacgcctgcattaatgacatagacgaatcgcggacagtagaaatgacgcagttcggtgcttgatgggcaagtacgtccatcaggcgaggcatgaaataaatctccccaatatccgtcattgccagggtgaaagtacgctccgaagtaagggggtcaaagctctcatgatgttgtaaagcgttacgaagggcgtgcatggcactggtgacaggctcggccaagtgtgcggcgtatggcgttggttccatcccttggtgagtacggacgaacaacggatcttgtaacgatgtacgaaggcgttttaatgcgttagaaactgcgggttgagtaagcccaagattttctgcggtgatggagacgcgacgatctaccagcagctgattaaagacaactaacaggttaaggtccagatcacgcaattccat

SEQ ID NO: 1279 - DNA, 155 bp, Artificial Sequence
  source: /note="Description of Artificial Sequence: Synthetic polynucleotide"
ggggcctcgcttgggttattgctggtgcccggccgggcgcaatattcatgttgatgatttattatatatcgagtggtgtatttatcaatattgtttgctccgttatcgttattaacaagtcatcaataaagccatcacgagtaccatagaggatc

SEQ ID NO: 1280 - protein, 300 aa, Pseudomonas sp.
MELRDLDLNLLVVFNQLLVDRRVSITAENLGLTQPAVSNALKRLRTSLQDPLFVRTHQGMEPTPYAAHLAEPVTSAMHALRNALQHHESFDPLTSERTFTLAMTDIGEIYFMPRLMDVLAHQAPNCVISTVRDSSMSLMQALQNGTVDLAVGLLPNLQTGFFQRRLLQNHYVCLCRKDHPVTREPLTLERFCSYGHVRVIAAGTGHGEVDTYMTRVGIRRDIRLEVPHFAAVGHILQRTDLLATVPIRLADCCVEPFGLSALPHPVVLPEIAINMFWHAKYHKDLANIWLRQLMFDLFTD

SEQ ID NO: 1281 - DNA, 164 bp, Artificial Sequence
  source: /note="Description of Artificial Sequence: Synthetic polynucleotide"
agttgttcttattggtggtgttgctttatggttgcatcgtagtaaatggttgtaacaaaagcaatttttccggctgtctgtatacaaaaacgccgcaaagtttgagcgaagtcaataaactctctacccattcagggcaatatctctcttggatccaaagtgaa

SEQ ID NO: 1282 - DNA, 201 bp, Artificial Sequence
  source: /note="Description of Artificial Sequence: Synthetic polynucleotide"
agttgttcttattggtggtgttgctttatggttgcatcgtagtaaatggttgtaacaaaagcaatttttccggctgtctgtatacaaaaacgccgcaaagtttgagcgaagtcaataaactctctacccattcagggcaatatctctcttggatccaaagtgaacccgcatcccacgctaactaatataaggggggcaaga

SEQ ID NO: 1283 - DNA, 1251 bp, Artificial Sequence
  source: /note="Description of Artificial Sequence: Synthetic polynucleotide"
atgacgacccgaaatgattgcctagcgttggatgcacaggacagtctggctccgctgcgccaacaatttgcgctgccggagggtgtgatatacctggatggcaattcgctgggcgcacgtccggtagctgcgctggctcgcgcgcaggctgtgatcgcagaagaatggggcaacgggttgatccgttcatggaactctgcgggctggcgtgatctgtctgaacgcctgggtaatcgcctggctaccctgattggtgcgcgcgatggggaagtagttgttactgataccacctcgattaatctgtttaaagtgctgtcagcggcgctgcgcgtgcaagctacccgtagcccggagcgccgtgttatcgtgactgagacctcgaatttcccgaccgacctgtatattgcggaagggttggcggatatgctgcaacaaggttacactctgcgtttggtggattcaccggaagagctgccacaggctatagatcaggacaccgcggtggtgatgctgacgcacgtaaattataaaaccggttatatgcacgacatgcaggctctgaccgcgttgagccacgagtgtggggctctggcgatttgggatctggcgcactctgctggcgctgtgccggtggacctgcaccaagcgggcgcggactatgcgattggctgcacgtacaaatacctgaatggcggcccgggttcgcaagcgtttgtttgggtttcgccgcaactgtgcgacctggtaccgcagccgctgtctggttggttcggccatagtcgccaattcgcgatggagccgcgctacgaaccttctaacggcattgctcgctatctgtgcggcactcagcctattactagcttggctatggtggagtgcggcctggatgtgtttgcgcagacggatatggcttcgctgcgccgtaaaagtctggcgctgactgatctgttcatcgagctggttgaacaacgctgcgctgcacacgaactgaccctggttactccacgtgaacacgcgaaacgcggctctcacgtgtcttttgaacaccccgagggttacgctgttattcaagctctgattgatcgtggcgtgatcggcgattaccgtgagccacgtattatgcgtttcggtttcactcctctgtatactacttttacggaagtttgggatgcagtacaaatcctgggcgaaatcctggatcgtaagacttgggcgcaggctcagtttcaggtgcgccactctgttacttaa

SEQ ID NO: 1284 - DNA, 1023 bp, Artificial Sequence
  source: /note="Description of Artificial Sequence: Synthetic polynucleotide"
agttgttcttattggtggtgttgctttatggttgcatcgtagtaaatggttgtaacaaaagcaatttttccggctgtctgtatacaaaaacgccgcaaagtttgagcgaagtcaataaactctctacccattcagggcaatatctctcttggatccaaagtgaacccgcatcccacgctaactaatataaggggggcaagaatggacttttccaacatgagtatccttcactatttagcgaatattgtagacattttggtggtttggttcgtaatttacaaggttatcatgcttatccgcggcacgaaagccgtccagctgttgaaggggattttcattattattgccgtcaagttacttagcggcttcttcggattgcagacagtggaatggattactgatcaaatgctgacttggggtttcttagccattatcattatctttcaaccggaattgcgtcgtgccctggagactttggggcgtggcaatatctttacccgctatggatcacgcattgagcgtgaacaacaccaccttattgagtctattgaaaagtccacgcaatacatggcgaagcgtcgcattggagctttgatctctgtggctcgtgatacaggcatggacgactacatcgagactggcattccgcttaatgcgaaaatctcatcgcaattattgattaatatcttcatccccaatacccctcttcacgatggcgcagtgatcattaaaggtaacgagatcgcgagcgctgccagttatctgccattgtccgactcgccgtttctttctaaggagctgggaactcgccatcgtgccgcattagggatttccgaggtgacagattcaatcacaatcgttgtcagcgaggaaacaggtgggatttcccttacgaagggaggcgaactgttccgtgatgtatccgaagaagaattgcataagattttgcttaaagagctggtgactgtcacagctaaaaaaccaagcattttctccaaatggaaaggaggtaagtccgagtga

SEQ ID NO: 1285 - DNA, 59056 bp, Escherichia coli
aggcctctcctcgcgagaggcattttttatttgatgggataaagatctttgcgcttatacggttggatttcgcccggtttgcgagttttcagcaattttaatatccaggtgtattgttctggtcgcggaccaacaaaaatctcgacttcttcattcatccgccgcgcaatcgtatgatcatccgcctctaacagatcatccatcggtgggcgcacctgaatcgtcagacgatgcgtcttgccatcataaatcggaaatagcggtacaacgcgcgcacggcacactttcatcaaacgaccaatcgcgggcaacgtcgctttataggtggcaaagaaatcaacaaattcgctgtgttctgggccatgatcctgatcgggtaaataatatccccagtaaccctgacgtaccgactggatgaatggtttaataccatcatttctcgcatgcagacgaccaccaaagcgacggcgcaccgtgttccagacataatcaaaaaccgggttgccctgattatggaacatcgctgccattttctgcccttgcgaggccatcagcatggcaggaatatcgacggcccaaccgtgcggcaccagaaaaatcactttctcgttattacgtcgtatctcttcgatgatctccagcccttgccagtcaacgcgcggctgaattttctccggcccgcgtattgccaactcagccatcattaccatcgcttgcggcgcggtggcaaacatctcatctacaatcgcttcgcgttcagcttcactacgttctggaaagcagagcgacagattgattaacgcacgacggcgtgagctttttcccagtcgtccggcaaaacgtcccagccgtgccagaatgggatcacggaactttggcggcgttaaagcgatacccgccatcgctgctacgcccagccatgctccccagtagcgcgggtggcgaaaggatttatcaaactcaggaatgtattcgctattattttttttcgtttccatgcttttccagtttcggataaggcaaaaatcaatctggtgatagtgtagcggcgcaacttgccccgcaccaaataaaaaagccggtactgactgcgtaccggctgcgaatggatgttaattaatcaaaccgtagctgcggcacaatctctttggcctgtgccaggaattcgcgacgatcggagccggtcagcccttcggtacgcggcagttttgccgtcagcgggtttacggcctgctggtttatccatacttcatagtgcagatgcggcccggttgaacgtccggtattaccggaaagcgcgatacggtcgccacgtttcaccttctgtcccggtttcaccaggatcttgcgcaagtgcatataacgcgtggtgtagctgcgaccatgacgaatagccacataataacctgctgcgccactacgtttggcaaccaccacttcaccgtcacccactgaaagcactggcgtaccttgtggcatggcaaaatcaacacctctgtgtggcgcaacgcgaccggtcaccggattagtacgacgcgggttaaagttagatgagatacggaactgtttcgccgtcgggaatcgcaagaatcctttcgccagaccagtaccgttacgatcgtagaatttgccatcttcagcgcggattgcgtaataatctttaccttctgaacgcaaacgtacgcccagcagctggctttgctcacgtttaccatcaagcatttctcgtgacattaacaccgcaaattcatcgccttttttcagtttgcggaaatccatttgccactgcatggctttaatcactgcgctcacttcggcgctggttaaaccggcgtttctggcgctggcaacaaagcttcccccgacggtacctttcagcagattgttgacccactctccttgctgcatttcgctggtcattttaaaaccgttagcggcagtacggtcataggttcgggtttcacgacgagacacttcccaggtgaggcgctgcagttcgccgtccgcggttaatgtccaggagagttgttgaccgattttcaggttacgcaattctttgtcggcagcagccagttgggtgatatcacccatatcaataccatactgattgagaatgctgcttagcgtatcgccagtggaaacaacatattcatgcacgcccgcttcaccggcgattttgtcatccagttcgtcctggggaatggcttcatcttcttgtgcagcttgatcaatcggctcactggcttcaggtaagagcgaacgaatttcgttctgttccagctcaatggttttgacaattggcgtggcatcgcggtgataaacatagggccgccagacagcgacggccagagtaagaacggtgagcgaccccaacataacgcggtgtggtcgcggtaaattattaaacgccagggcgacagagcgggctatctgttgcacgtaatcacttcctcattaatctcctttcaggcagctcgcatactggttggctaattgattcaggaattctgaatagcttgttttacccagtttgatattcgtccccaggggatccaacgttcccatacgaacggatgtccctcgtgcgacgctctcaacgaccgctggcctgaactgtggctcagcaaaaacgcaggttgctttttgctcaaccaactgtgttcttatttcatgtaaacgctgcgcgccaggttgaatctcagggttaacggtaaaatgaccaagcggtgtcagtccgaactgtttttcgaaatagccgtaagcatcgtgaaaaacgaaataacctttccccttgagcggcgcgagctcgttaccaacctgcttttcggttgaggctaattgtgcctcaaaatccttcaggttggcgtcaagtttggctcgactttgcggcataagttccactaattttccatggattgcaaccgctgtagcccgcgctatctctggggaaagccaaagatgcatgttgaaatcgccgtgatggtgatcttcgtcacttttttccgcgtggtcgtgatcatcatcatcgccgtgaatacttttcatcagcagcggtttcacattctctagctgcgcaatcgttacctgtttcgcttcaggtaatttacttaccggtttttgcatgaacgcttccatctccgggccaacccaaacgactaagtccgcgttctgtaagcgttttacatctgatggacgcagtgaataatcatgttctgaagccccgtcaggtagtaaaacctccgtttctgttaccccatcagcaatggcagaagcgatgaacccaacgggtttaagcgaagcgacaacggcagcatctgcggcctgtgttgcaccgccccagagagcggcggataatgctgcgaaaagaagcgtttttttatgtaacataatgcgaccaatcatcgtaatgaatatgagaagtgtgatattataacatttcatgactactgcaagactaaaattaacatgacaagtctggtttccctggaaaatgtctcggtttcttttggccaacgccgcgtcctctctgatgtgtcgctggaacttaaacctggaaaaattttgactttacttgggccaaacggcgcaggtaagtcgacactggtacgggtagtgctcgggctggtaacacccgatgaaggggttatcaagcgcaacggaaaactgcgcatcggctatgtaccgcagaagctgtatctcgacaccacgttgccactgaccgtaaaccgttttttacgcttacgccctggcacacataaagaagatattttgcctgcactgaaacgtgtccaggccgggcatctgattaacgcaccgatgcaaaagctctcgggtggcgaaacgcagcgtgtactgttagcgcgagcattgttaaatcgaccgcaattattagtgctggatgaacccactcagggcgtggatgtgaatggtcaggtggcgttatatgaccttattgaccaactgcgtcgcgaactggattgtggcgttttaatggtatctcacgatctgcatctggtaatggcaaaaaccgatgaagtgctttgcctgaatcaccacatttgttgttccggcacaccggaagttgtttccctgcatccggagtttatttctatgtttggtcctcgtggtgctgaacaactgggtatctatcgccatcatcataatcatcgtcacgatttacagggacgaattgttttgcgtcggggaaatgatcgctcatgattgaattattatttcccggttggttagccgggatcatgctcgcctgtgccgcgggtccgctgggttcgtttgtagtctggcgtcgtatgtcttatttcggtgatacgctggctcatgcctcattacttggcgtcgcgtttggtttgttgctggacgtgaatccattctatgcggtgattgccgttacgctgctgctggcgggcggtctggtatggctggagaagcgtccacagctggcgatcgacacgttattagggattatggcgcacagtgccctgtcgctgggcctggtggtcgttagtctgatgtctaatattcgtgttgatttgatggcttacctgttcggtgatttactggcagtgacgccagaagatctcatctctattgcgattggcgtggtcatcgtggtggctattttgttctggcaatggcgcaatttgctgtcgatgacgattagcccggatctggcgtttgttgatggtgtgaaattacagcgcgtgaaattgttgttgatgctggtgacggcattgacgattggtgtagcgatgaaattcgtcggcgcgttgattattacttcactgctgattattcctgctgctactgcacgtcgctttgcccgcacgccggaacagatggctggtgtcgctgttttggtggggatggtggcagtgactggcggtttaaccttttccgcattttacgatacacctgcaggcccgtcggtggtgctatgcgcggcactgttatttattatcagtatgatgaaaaagcaggccagctaatctgtcgctgaacacatttgtcggatgcggcgcgagcgccttatcccacctgcggttcgctatctctggtaggcctgataagacgcgaacagcgtcgcatcaggcacactgccagtgtcggatgcggctcgagcgaccaatccgacttacggcatttctggcggcgtgatgccgaagtggttccacgcccgcactgtcgccatacgcccgcgcggtgtacgctgcaaaaagccttgctgaatcaaataaggttccagtacatcctcaatggtttcacgttcttcgccaatggctgccgccaggttatccagacctaccggcccaccaaagaacttatcgattaccgccagcaacaatttgcggtccatataatcgaaaccttcagcatcgacattcaacatatccagcgcctgagcagcgatatctgccgagatggtgccatcgtgcttcacttcagcgaaatcacgcactcgacgcagcagacggttggcaatacgtggcgtaccgcgcgcacgacgagcaacttccagcgcgccgtcatcactcatctcaagccccataaagcgtgcgctgcgactgacgatatattgcagatccggcacctgataaaactccagacgttgcacaataccaaaacgatcgcgcaacggtgatgtcagcgaacctgcgcgcgtggttgcaccaatcagggtaaacggcggcaaatcaattttaatggagcgtgccgccggaccttcaccaatcatgatatccagttggtaatcttccattgccggatacaacacctcttccaccactggtgaaagacggtggatctcatcaataaacagtacatcgtgtggttcaaggttagtgagcattgctgccagatcgcccgccttttccagcaccggaccagaagtcgtgcgtaaattaacgcccatttcattggcgacaatattggcaagcgtagttttacccaaccccggaggaccaaaaatcaatagatgatcgagggcatcgccgcgcagtttcgctgctttgatgaaaatctccatctgcgaacgaacctgcggctgaccaacatactcttccagtaatttagggcgaatggcgcgatctgccacatcttccggcaaagtggtaccggcagaaatcagacggtctgcttcaatcatcctttacctcataacgcggcgcgtagggcttcgcgaattaatgtttcactgctggcgtcagggcgagcgattttgctcaccatgcggcttgcttcttgtggtttatagcccagtgccaccagcgcagcaaccgcttcctgttcagcatcgtcggtcgccgggctggcaggagacgtgagtaccaggtcggcggctggcgtaaagagatcgccatgcaaacctttaaatcggtctttcatttcgacaatcaagcgttcggcggtttttttgccaatacccggcagtttcaccagtgcccccacttcttcacgctcaacggcattaacgaactgctgcgctgacattccggagaggatcgccagcgccaacttcgggccgacgccgttggttttgatcaactctttgaacaacgtgcgctcttgtttattgttaaaaccgtacagcagttgcgcgtcttcacgcaccacaaagtgggtgaaaacgatcgcttcctgacccgcttcagggagttcataaaaacaggtcatcggcatatgcacttcatagcctacgccgcccacttcaattaacaccagcgggggttgtttttcaatgatgatgcctctgagtctgcctatcacatgacgctcctgcgtaatgaatcaaagataatgctgtatgataaaaaaatgctggatagatatccagcgaaggatgaagaaaacttgcgaggtgtctcgatgatctgaaaaatggcgcagtataatttattctacagattatattggaagcaaatatttaaatattacatattcagcgaagaaatgtgtaataaaaatacacattgcgacccctgaaaaaaataaattttttatgctattacgtatattcatatctatttcaatggaatgacaacgtgaatattaattatcctgctgaatatgaaattggtgatatcgtctttacatgtataagtgctgccttatttggtcaaatatcagctgcatcaaattgctggagtaatcacgtcgggatcattatcggtcataacggtgaagactttctggttgcagaaagccgtgttcccctctcaaccatcactacgctatcccgttttattaaacgctctgctaatcaacgctatgctataaagcgattagacgccggactaacagaacaacaaaatcaacgaattgttgaacaggttccttcccggctacgcaaaatttaccacaccggttttaaatacgaatcttcgcgccagttctgttcaaaatttgtttttgatatttataaagaggcgctatgtattccggtgggtgaaatagagacgtttggagaattgttaaatagcaatccaaatgcaaaactcactttctggaaattctggttcttaggttctattccgtgggagcgtaaaaccgtcacgccagccagtttgtggcatcatccgggtttggtgttgattcacgcggtgggagttgaaacgcctcagcctgaactgaccgaggcggtataacttaacgcagtcgccctctcgccaggttcagtcgcgattcgctcatttgcatcgcattctgactaacgtggcagtgggtgatggcaatcgccagcgcatcggcggcatccgcctgtggattagcgggcagtttcagcaaggtgcggaccatatgctgcacctggcttttttcggcactaccaatacctaccactgtttgctttacctgacgtgccgcatattcaaataccggcaattcctgattcaccgccgccacaatcgccacgccgcgcgcctgccccagtttcagggctgagtcagcgttcttcgccataaagacctgttcaatggcgaaataatcaggctggaattgggtgatgatttccgtcacgcccgcatagatgagcttcagacgagacggtaaatcatccactttggtgcgtatgcatccgctacccaggtaggacagttgcctgcctacctggcggatgacgccatagccggtcacgcgcgaacccgggtcaatgccgagaataatagccatcacgcgtctccgttttgctgtttagcaggcctcatcagagagtcgctgcaacctcatcagagatttcaccgttatggtaaacttcctgcacgtcgtcgcaatcttccagcatatcgatcagacgcatcagtttcggtgcggtttctgcatccatatcagctttggtggacgggatcatggaaacttccgcgctgtctgctttcagacctgccgcttccagagcgtcgcgtactttgcccatttcttcccatgcagtgtagacatcaatcgcgccgtcatcataggtcacaacgtcttcagcaccggcttccagggctgcttccatgatggtgtcttcatcgcctttctcgaaggagatcacgccttttttgctgaacaaataagctacggaaccatcagtaccgaggttaccgccacatttgctgaatgcatgacgcacttcagcaacggtacggttgcggttgtcagacagacattcaatcatgattgccgtgccgccaggaccgtaaccttcgtagatgatggtttccatgtttgcatcatcatcaccgcccacacctcgtgcaattgcgcggttcagagtgtcacgggtcatgttgttagacagtgctttatcaattgctgcacgcaaacgcgggttagcgtccggatcaccaccgcccagcttagccgcggttaccagctcacgaatgattttagtgaagattttaccgcgcttagcatcctgcgcagctttacgatgtctggtgttggcccatttactatgacctgccataaaaatatctccagatagccctgcctgttcaggcagcgttaattacaaactgttcaatcgcctgccggttgctccaggacttagtgagcgccgccgcagcagacgcatcaagccacttgtaagccagatgttcagtgaaaacgatctggcgctcgtgcggaagcgcaagacagaaccatgattccgtattacgcgtcacgcccggcgcatagcgatgacgtaaatgtgaaaaaatttcaaactctaccgtgcgctgacagtcaattaaggtcagttgttcagcgacaacatcaatggtgacctcttcctttacttcgcgcatggcagcttgcggcgcggtttcaccctcttccacgctgccggttaccgactgccagaaatcgggatcgtcacgccgctgcaacatcagcacccgtttcgtatcttgtgcgtagatgaccactaagatcgaaacgggacgcttataagccatatcagttattctcagccttcttcacaacctgaatgctcagctcagccagtgcagtcgggttagcaaagctcggcgcttcagtcatcaaacacgctgccgccgtggttttcgggaaggcgataacgtcacggatattgtcggtgccggtcagcagcatcgtcagacggtcaagaccgaatgccaaacctgcgtgcggcggagtaccgtatttcagggcgtcgagcaggaagccgaatttctcgcgctgttcctcttcgttgatacccagaataccaaacaccgtctgctgcatatcaccattatggatacgcacagaaccaccgcccacttcgtaaccattgatgaccatatcgtaagcgttagccaccgcattttccggtgcagctttcagttctgctgccgtcatgtctttcggtgaggtgaacggatggtgcattgctgtcaggccgccttcaccgtcgtcttcaaacatcgggaagtcgataacccacagcggtgcccatttgctttcgtcggtcagaccaaggtctttacccactttcaggcgcagtgcgcccatcgcgtcggcaacaattttcttgttgtcggcaccgaagaaaatcatatcgccatcttgcgcgccagtacgctccaggatggcttcgatgatttctgcattaaggaacttcgctaccgggctattgataccttccagacctttcgcgcgttcgttaactttgatgtaagccagacctttcgcgccgtagattttaacgaagttaccgtattcgtcgatctgcttacgggtcaacgatgcgccgcccggaacacgcagagcggcaacacggcctttcggatcgttcgccggacctgcaaatactgcaaactcaacagatttcagcagatcggcaacgtcggtcagttccatcgggttacgcagatccggtttatcagaaccataacggcgttctgcttctgcaaaggtcattaccgggaaatcgcccagatccacgcccttcacttccagccacagatgacgcaccagcgcttccatcacttcacgcacttgcggcgcggtcatgaaagaagtttccacatcgatctgagtaaattcaggctgacggtcagcacgcaggtcttcgtcacggaagcatttaacgatctgatagtagcggtcaaagccggacatcatcagtagctgtttgaacaactgcggggattgcggcagcgcgtagaatttacctttgtgcacacgagaaggcaccaggtagtcacgcgcgccttcaggcgtggctttggtcagcatcggagtttcgatgtcgaggaagccgtggtcatccataaaacggcgcaccaggctggtgattttagcgcgggttttcaggcgctgagccatttccgggcgacgcaggtcgaggtagcggtatttcagacgcgcttcttcggtgttgacgtggttagagtcaagcggcagaacatctgcacggttgatgatagtcagcgaggacgccagtacttcgatttcgccagtcgccatatcgcggttaatatttttttcgtcacgcgcacgtacggtgcccgtgacctgaatgcagaactcattacgcagttcagaggccagctttaacgcgtccgcacgatccggatcgaaaaatacctgcacgataccttcgcggtcgcgcatatcgatgaagatcaggctaccaagatcacgacgacggttgacccaaccacacagagtcacctgctgccccacgtgggacaaacggagctgtccacaatattctgtacgcatgagatatcccttaacttagctgccggcggatgccccctgctgcgcaggtgaccaagtcgcagcgttagctgtatgtcacaactgaatgaaaaaaggcggctattatactggaaattctgccgcaccgtaagagcctggcccgcgctggaacgcctcgttaccactttatatcgggcctgaaatcagactctacgccagtttgctataaaggtgttgcccgaactcataaaaattaacaaaatttgtcgttccgccatcggctaatcgcattaaggtgagaggcacgattttgttttgtcaggagtcatcatgcttgaacttaatgctaaaaccaccgcgctggtggtgattgatttacaagaaggcatcttgccttttgccggaggtccacatactgccgatgaggtggttaatcgcgccgggaagctggcggcgaaatttcgcgccagcggtcagcccgtgtttctggtgcgcgttggctggtctgccgattacgccgaagcattaaaacagccggttgatgccccctcccccgcaaaagtgttgcccgaaaactggtggcaacatcctgctgcattaggtgcaaccgacagcgatatcgaaatcatcaaacgtcaatggggtgcgttttacggtacggatctggagttgcaattacgccgccggggtatcgatacaatagtgttatgtgggatctcgaccaatatcggtgttgaatccaccgcccgcaatgcctgggaactcggttttaatctggtgattgccgaagatgcctgtagcgccgctagcgccgagcagcacaataacagcattaatcatatctacccgcgcatcgcccgtgtgcgtagcgttgaagagatcctcaacgcgttatgatttacatcggtttgccacaatggtcgcatcctaaatgggtgcggttggggatcaccagccttgaagagtatgcccgccactttaactgcgtgacgcgggcattttaaaaatcactaaagaacgcccaagagcatgtgttttctttagtttattcaatgcattaaaaaatagtttcgcatgaaattcggtaaacttcatgtgtgcaataatgtcccattcatgccccaaaatgccccaaagcagacatttttgccccaagtatgccccacaagtcacgtcttcaagtcgtctatatccatagcacaccgagttacattcttgcatccggggtgtcgacaatacctactttattgagtgtgcgagaattaccaggaacctttccacaatgtagtagtctaatagtcgaatccatctaacattaagaagcgttatgatcactagcctctcattgatatcttctgtaatagtcactctatgtatcatggtgttcgctacagtaaaggtagggattggtttgtctaacaatccagacagaaatgataattaacctcaaccacgtaaccacacttcatacttcatacttcacttaacagtgaagtgctcacatcaccgggcagtcatcaaactccgcattcctggcatcattaatgatgtacgtgatcactccaaatatagcgggtgcagaactgtaaccatcatcatctgctggcagcgcttcccttctcccgttatccagattaaccaggtgcggctgaggatgagtccgatatcgcttgatcctgaattccccgtcgattgcacatatcagcagtgaaccatcgcaggcagtaagtgacgcatccacaacaagcaacgctccctggattatcccttccctgaaatgtgaacgcgatgcccgcatgaaataagtcgctgcgggctgactgattagctgctgatcgagggagattcgtgtttcaacataatctgccgcaggtgaaggaaatcccatgtttacgccctctcttgaataccggataaaaacacagtataaatactgtatatccatccagcaaagaggcaatgagcaatgttcgtggaactcgtttatgacaaaaggaattttgatggtctgcccggtgcaaaagatatcattctgggcgagttaactaagagagttcaccggatcttccccgatgctgatgttcgggttaaaccgatgatgacactgccggcgatcaacactgacgccagcaagcatgagaaggaacagataagccgtactgttcaggaaatgtttgaagaggctgaattctggttagtgagtgagtaaagattttcaatgcccgccacagttacgtattgattatgctgtggaggatattcattttcgtaaacgttggtttgggagaagcggcaaaacggaatgtgggaacaggggaaaatcagataccagatatgtctgcatttccatctggcaataactggtttcagttaccaagtggacatatcgttcagatattttccatgaacgttcttggtgcagatgctaatggcacgtcagctaattaccccattgcttttccaacaacgatgattgctgtcagtgctctatggtctgatgggactgtagcaaatgcaccgacatacaagatgatggggaacacgactaacagaacaactttgacgataaaagtatcagccagctcaggtacttacgggacaatgattattgcggtgggacgataatatgaataaatacagttactctccttcagaaaatgccttttatgctgttgcgttaaaaaatacctatgaattgagtggcacatggccagctgatgcattagatattcctgatgacatttctgtaaaatatatggcggaaccgccacaagggaaaatccgagttgcaggggaaaatggttttcccacatgggctgaaatacctccaccatcacatgaggaacttattgaacaggccgaatcagagaggcaattattgattaaccaggccaacgaatacatgaacagtaaacaatggcccggtaaagccgctattggtcgtctgaaaggcgaggaactggcacaatataattcgtggctggattatctggacgcactggaactggtcgatacttccggtacgcccgatattgaatggcctacgcctccggcagttcaggccagatgacatccggcgcggtgctggtatctgttgcagtcaccgcgtcaatgtaatccagcacggcgttaagtcgggttgtttctgcctgagtcagtttccgtccggcctgtaatttcagctgaatcagactaatggaagccattgctgcatcaatcagtgattggcgctgtgcttctgccgcttctactgaggcaccgtgttgtgcctcagtatctgtcacccatttctcaccatcccatttatcatatggcgttaacggtgaaagcgtgacataaccgtttttgatggcaccgatataatccactgtaacagctgcgccattttcgattgagtaaacagtctcattgcgatggtcttcctcatggctccatcccttacctgtaaatactgccactcttcccggaatgttttcgtccgggtcaataccagtggaacaggcgggcatacttacgccagtattaatatattcatcagaccagcccgtatattcagacgttactgcatcataataaaaacaacgcatatcacccggcactgcagccagcccattttcatcaaaaacaggtttcattatttagccctcaccagaaagttaaatgcaatatttcgcggtctgacagcaacaaaattcacaccatcacccacagagttactgttgaaattaaatcgtgaaaatcctggctgatttccggcgatgccatcatgaaagttaattgcgtgtccagcacctccgcctatattcccggcaaactgagaaaagtttgtagcttcctgccagcttaataattcgcgaccaccatctgcacctcgcccgtcatcccagacacgaatgaaatcaccgcgggcttcaggtaataccagcgaaggaaacactttcgccagcacaggataatcagtggcagagaatttcgcgccgttgaacttcaaaaacaccatactggaccagctgtcgattacagtatttggcattgcagcggacggccagaagaacggaacgccaatagctggagaaccttctcccaaaccaaggtttgtgcgagcgtctgcggcattcgttgcgccggttccgccgtctgcgacagtaaccgcaccgttgctccctttctgcgcaagtttaccgatgcctgggatggttacggcggtgccgttgatggtaactgtgatgctttggtttgctgaggtggtggcgaacgtctcccacgcgccaatattctcgtcgtactctttgatgagctgtgacatggcctgcgccaggccgtcgactgagatattgtccgacacaaggattccatacttctggccgctcagcgccggggaaactgctggcgtaaccgtcattgacgtggcgctgttcacggatgaaatctgaaacagctgcaccgggttagacatcacgataatcgtctggccagcgcggacctggctggcgggagctgtccagtttgtgccggagccggttgcggtatttccgttaatagagatagttccggtgctataaatcataacaactcctaaatttagacaacatgaagcccggagaggtatataaccctcaccagaaataatttctgaattggtttttaatacatgttgggcaacgccagtgttggcatagctatagttgtatcaaatgccattgaccacccacccaaataataattgccgactactttattcctttctgctctgacattcccacctgtcattacaattcctttatacctaatatttccgtaaccaccaacgtgtcgacagttagccccggtataaacaatctggcaaaattcatcaccaatattcaggttcgcattggcgatatttattgtcccatcaaaaatgaatggcttcgtgcaagtaagaagacgtttgcgttgacgattggtttattcaatccatcaactaaaatatcatgtaaacgaattgccataacatttcccactttattttacttactcaacacaacaagtatattaaaattgaaccttgtcaacaacacaaaggagtcccaatgaaactcgctctaattatgctgccattatgtctgtccctcactgcatgtggtaatggtttaaataccggtaaaccaaattccggtgtcattccaaaacctttggatcgagatggtaacggttctttaatttatgataccgaaaaccttccaatgacggggcagtggtgtcacgagattgatcacgaataccgacgaatcggtagcccttctaactgtgttatagactactaaatattaacccctcaaaagaggggttaatattttaacctgtgaatgaaccagatccgtgtgatactatgatagtaggcgaagaaattgacgcacccctgttattttgagcggacactttaatacgcactgttacgtttggacctgttacaaccgcagaatgcatgataagtctctccatgtcttgcacggatgaaccactctcattgccgttaatgtcgattgttcctgcaccattacctttaacgtttgctataacacagacgtgtcttgcgtgcccagaactggatgaatcattataagtcattaccttttctaaatatccgtcactagaccgactcacattcgtccctgtgtgcatatttgcaatgtccccgataaaactttgggcttccacagtccctttgaatttaccgcttgttgcttggatctcaccagtaaagctaccgccactagcatatactacacctctgacggtcacattgttgaattcagcatctccagctttattcaacttccaaccagcagaaccagctgcatagttgttggactggatatagttaccgatttttgcgttctcaatggtgccgtcctggatgaagctggcccggatgaatgtctgcccgttctggatcacgaacggcaaagctacgctatttccggctgccgtggtgacggcgaagcggtcagccaggaagataacctgcgactgcatgccggatggcgtattctccacgccgatacccatccccgcggcgtaatactgcccgttgctggagacaccaaccttgatgttgtacatcgcgctgagttcgccattaacgttggctatagcctgagcgttagtggtgatggcggaggtatgcccgttcacggtcgccgtgatgccgtttatctgcgtggcggtggcctgctgatagtcggagagcgtctgattcaggctgttgatggatgccttgttgccgttgacgtccgtctgcaggctcagcaatgaacgtgctgtggcttccttctcactgacgatcacctcgtcgagacggtccagattcgcgctgttgccggcgaccgatgcagaaagggttttacgcgtggccacctgagcgaggttggcctggattatcgcaattgcagagttcttcaccccgcccgtcatgccgtccatagaaacgctgatgttgtcgattcgctggcccagggcggtatcagccgtcgcaacggtctgctcaagctgactgagtgaagacgaaacattcccgaccgtgctggaaagctcattaacgctggtctgaaccttcccgacgtcctgggcatttttggcgatatctttcgcttgctgctccagttcgtcgttggcctgtttgatatcgttagccatgccagcaattttttcgttgctgtccaccgcgttctcgatcaggtctttgaacgtttccgactctttcatatcctccagaatgtcattagttatttcgctgacatctatcgaggacgtgcccatgatccagtcggtccagtccccggcgttaccgatacggtcaatcaggcgcgcgcggtaccactggcgaacgccggcaggcatggggccatgctgataatctgcagccgggtacggcaccaggaccagcagttcaggattggcgtagtcggcagttgtggcgcgctgaatctctgtataggccgtgtcgcctgagccatccggaaatttccaggtcaggtcgatatgccagaccacatcttcggtcgccaggaagttgagcggagtacccggttttcccgttttaccggagagataagttgtttcaccgtatccccatggtgacgacgtatcctgcgcattcagcgcccgtacgcgcacgtcatagctgcccgaataaatgccctgaaccgagaaaccctgcgcgctggtaaccggaacgtttatccagtccccgttgtccttacgccactgggcaacataccggattgcgccctctaccttatcccatgacacgtccaggcttgctacagtcagcccctgagacacatgatcgctctcagtcaccacgatattcttcggagcagacaggacgcttatcggcgtgacggtgatcgggggagactcgacccgaacgccgtcatcgatgtaacgatatttgtttggatcgtgctgaacggccgtaatagtgaaaccgcctgtactgtcgtcgttagccgcgattgaggtgaccctgaagtactgtattgcgaggttatcactgtctatcgcccaaacagcgcccgccacaggaacctgactgaatgccgtagccaccgtcaccgtttttttatcggcgctcaccgcgctgattgtccgcgtctgggcttttccgtcgggaaggttaaccaccagccggtctttcgccgcgtagtctatttctcgatcgagggtaatttggcggccgttggccgcgcttatacggcccccgttctccttaccagagcggaaaggatcggcgacaccgataatttcagcgggcaaagggatataaccgtccagccccacgccaaacgatacggtcccgtctttggcattggagagcaatacccagcgaccgcgtcggtgcgcttcactttgcgaggtgcagccgattgcggtcagggacgtctgccggacgtcgtaacgttctacaagcgccgaatcgtaaaccccctcaacggtatcgctgtaatggttctgcggatcggaccaggacaccaggcaggagctgtagcgattcttgtatgagccgcccgcataagtaaacagcccatcgataacgtttgagacgttataaacccagtcaacatcgtcctgcgggacgtctgcctggacataaatctgatcgtttccccagaacgttattccacgaaataccgcggcgagatcgttaagtacctgccaggcgtcctcctggctctgaatgaaaacgttgcaggtgaaacgcggttcggtgccaccggccccgtcggaaaccatttcgtcacagtactgggcgattgaatacagcgcccacttatccaccatggacgcatccacgcgcgtgcccatgccgtaaatttcatccagaaccagatcgtaaaagatccaggcagggttattggaccatgccattttgaacccgccggaccatgaaccagaataggttcgggttttcggatcgtaattatccggaaccttaatcagcttgccttttatcttacaggtcactttcggcgcgctgccgttgaattggctgctgtccacttcgacatacaggagcgctgttaaaggataacgaagcttgctgtcgatgacttccgcatacgaaaacaccttgaaggcgttaaccagtttcgaatttgatccgctggcatcagccgtaatacgcctgaccctgacagaccagccggacgtggattttggcagatcgatacggtggtcacgctgatattccgtcgtggtctttccgtcaaacttgccgtttacaaccgttttccaggcgccgccgtccgttgataaatcgatcgcatactcggtgaccgtgcccaccatatcgccattatctttatagagatactggaccggaaggctgagcttgatacggatggcatccagggaaaggtttgtaaactggcgcgtccagggcgcggtggtggtgacagttgtgcccacggccagctcgttgtcgacctggggcatcccggcaatataggtctggtcctgtgtgcccttgcggaactcccatttcacgccgctgaagttgtattccccgctgtcgtttgccagcggcgtatcgttgagaaaaatgttctgagcggtcaggtcgccctgtatttccccctcagaaacggcaatgagcatttttaattttgcgaccgacagcagatcgtcaggctgctcaaccggagtatgtgaactgccacctccccctttggcaccctgcaggatggtttcttgtttaagaagctgcattttttcacccataaaaaaaggtgccgaagcacctttaagttagtggccgctggcctactgctgatcgctcgagtacataccggcgctgactatcgctccccctgcctcagtcagaccgtaggccagggggacaggatgccccatagcgacggtattgaccggcgccccgaaggcgtagttaggcgtgttgtccgtgctggaggatttacccgcgccgaaggatggctggggcgtgagcatctggacaacgccccccagcatcatcgacactccgacccctgtcagaattgacgtggcgctgatagctgttgcactcatcgccgcgccccaggctgccatgctcgcaccagcggtaaagaatgcagcgaccagcgcaacagccccgacaactatctgcaggacgcccgaacttttggccccctcataaacgggcacgatccggtacacgcttccaccgcgggtcatatcaaactcttccagcccgatattgttgccaccgttaaaaaaggcgaaacggatccccttcatatgagcttcagacatatattttttgaatccgggaacctgtgaacacatggccctgagcatctcgcgcaggtcggcaacatcaaactgaacgcgtttaccgaatttttttgccattttaccttcgagaataagcgtcttaaccatgcattctgtccttatgcctgaccacccggaccgttctgtcgcgataatattttccataaggcgttcgcgaagaaaggtgcccgaaaagatgatggagaatgatgttatcacccacatataccgcggcgtgattagtcaccgatgcctgcacactcatcatgatgatatctccgggctgcattgcaccggcggcaatctcaacgaatccctcacgctcccagttgtcgtcgtagagacgctccttgccgctctcccaccattcgtaaggtactgaataattgccgagaacaatgccgtattcgcgcagataaaattcacggataagcgaccagcagtcggcgtaacccagcacccactgccgcccggcataatcccggtcttcacgcggggaaatcgtacaaaaatccccgtccggccaggacatgatcccccactcaatccccgaccagtcgcactggatccggtccagctctgagggcaccagccgaaccacatccggatgggaatgaatgagcatgatgatctcaccgcgcgcgcgggcagcgagctggtcttccggggagagcgtgaatgtctcctcgggtttatcggcaatgttgcggcagggaataaagatttgttgctggcctgactgaacaatcaggccgcaggcttctttggggtattcagcagcgacgtgctgacggatagcatccagcaatttttcacgcatttttatttcccctgcaggtttgcagccggaaaaccgccgaacggcagcggcgcatccgggccgtgacgatcctgacaatcctgccggcggccgccacaaacatctttcgacgggtcatcggtcggtgtaccgtctttggtaaagtatttcgtgccgttgtaatcgcatccggtcccgcttcggtaccagccccgcatacaccaggtgcagacaggcgtaatctgccgtgtcggcagctgcaggctctgaatatcgaaaggagaacacagctcgaaatcaacctgtacccgcgtctctgcggttttagcattgacgtaaaagagctgtaagcgctcatcggccgggctggcacccggattaccgtttttccagttggcggcatcgagatacttcgaaagcgtggtatggattttgaccttagccctgaccatatcgtcatattcaagacacagcgcggtgacatagtttccgacgttcccgacggacagcgtgggcgttggctgggaacctgtactcgataactccatccccttaagttcgtagggatggggatcgtactggtttccctgccagataatggcgggcagattttctgcggcgaaggctgcccacccctcttcctgaatattgtgcgcatgaaaacgcagcacctgatccataccgaattcagtgccgtcgatctcaatcagctgaataacgctgccgggctcaagctgttgtatgtctgccgtaaaactcatactccccccataaaaaaaagccgcccggaggcagctttcagtgtttttcgagaaaatcagggcgcgaacgcctgttcaaaagtgaaggccacagtggcttttttcccggtagggaaagaaacgctgaacgaatcggccttcattctgaacagctttttttcaccccatggagtggtccaccagaacgatttagtaacgtgagacatcaggaaagcgcgcagcgcagccgcctcctgtctggtgcccgtccagtccaggttccacgtttcctgtttgtcgttgatccccatccccgctatctgtttgtagccatccccgaactgggcctgcagcgttcgggctgtttcagtgccctgcgctgtttttcgcgtgcgccaggtaaacgtgtccgtcactgtgtcctcctcgaataaagcacgccgcccgcggacatttcttttttcagtcgctcggtgattgtctgctgaacaatcgcctgcagctgtttcgccgtccccgtggcgttcgcctgatttatgcttccgtcactcccctgctggctgatgctgactggggcataaacactgatcccgcccatgccagcaccggctgcgttcccgccgccgaccagaccacccgaggcatacccgcgcatcaggcgatagagattagccacgccgatgcggctggttgattctttggtgaagacgaattccccgcggtgaacgataccggctggctcgtacttgccgccgtgcccggtaaaaccgcccacgtcaaaaccctgtggccggtatgacgggaccgcgaatgactgaccggcagaggaggttttcgccccgccgctaacccagcccattgcactctggatggtgtaagccaccagcagctggttgataacggacacaatcattttaaggatcgagctggtgaattccctgaagctcgccttcccggttgtcgtcaggctggtaagctggcccgccaacccgctgaacgtagcctgagaaatctgctgaacggagctgaaaacgtttgtcgctgaatcctgatattcggcccaaccctgtttcgcaccggccagccagtttgcacgcagggcatcttcagcttcgaacgtcgccctttgctcttccagaaccttttgctgcgcctgagggttgtacgaatagctttcgctgagacgctgcagcgtagtttgtcgcccggcttcccgggtggataacccctcagactgagcctgcaggcccgccctggcggctttttgctgctgctcaaacttcacggcctgatcggccagctggttgagcttttgctggctggcaaccttatcgcccaggtcggccagctgccgcttgtactcgagcgtttcttctttgtgcgccagcagggatttttcctgcgccgtaagctgacgacgcccagcggcctcctgcagaacggtgaactgattttcagtttgccagagatcctgacgctgtttacttatgacgtcgttcacgctggtatgctgctcaagcgttttaagctgggcctgaagggtgagaagttcggcctgcgccttttcctcggctttgtccccggcgggcgttgagtagcttttgcctttcggtgtttttggatccttccactgcttttcaatcccggcgcgggccgcggcaatgtccttttcagtccacagcgtggcgacaccgtctttcgcatcctggcggtttttctcaataagctgactgagctttttctctgctgaagcccgcttttctgccgccgtcgcgccggactccaccagctggttaaactgctgctggctgcggattgcctgagcctgctggtccgttcgcattttttcccgcgcggctgccagcccttcctgggcgtattgctgatcggcaagatcgtaagcctgctttttcagctccacctgctggcgcgcgtttctcagcctttccgcatccgctttctgcagaacgttgttaccggcataatccgggtcgaccttaagattgctggacagcgcgcggtactctttctctgctgcctgccactcagcaaaagagtcctggcgcttcatcgcggtgtcaggattacgcccgacgcccagcatcgcatcccacgcaccggaggcggcattcttcacccagttccaggctttttcgagggatccgagattatcctcgaccgcaccggcgcgctgaatgaccgcgtcggaatatgcccgcatggccagctcggcagccttctgagaatcccccagcgcctgagcagaagctatctgttcatactgggtggctgtcagaaaatgaagggaatcgttgagcgtcgcgaccgcgttaaccggatcatccttcaggcgtttaaactgatttatggtttcgtcaacggcctgcccggtagcctgctgcagcctggcggcaacattgctgaccatgctgacgtcattaccgctgaacgcgccgctgccaacgacctgcgccagcacgcctgcagcggcatgctgagtgatgccattacctgccagcgagcgcgccagcgcctgcagctgccctgacgttttccccgcgtagttcccggtcaggatcagctgcctgttaaattcctcagactctttgctgccgtcgtaccaggccttacccaacccgaataccgccgcggcaatccctccgaccatgctggcgatcccaagaccgcgcagtgacagaagctggtctatccaccctgcccggttagccagcgtgatcccggagccgcgcagcgcgccgaagttaccgcgcatgacctcgccgatcagtattcccagttcctgccgggcggcggcactttgcagccccagaccgtgcgtggcgactttggcagcttcgagcttgcggatatagacttcagccgcatcgctggcaccgacctgcgccgccttcatgcgcagtagctcggtaccggagagcttttgctctgcaacctgttgcttcagctggctgaggaatcgcgtgcgcgctgcggccgatttttcctccacgatctgcagttctttttgacgggccgtggtgcgggaaataagggcgagataatcctgctgggttatgttgccctgtgccctcgctgcgcgaaagcgcgcctgcacgttcgcaagcgactgtgtttcaccattgagctggcgtacgccgtcgatctggcggaaaaatgatgccgcaagttcatcctgtcgacgggcaagcgcagcggcctgcccgtcattctcacgcatgcgctgattaagctcggtcacgcggcggtgagtttcatcaacggactttgaaacgttctgccagtctttggtaagcccttccgttgcggccgactggcgggatttcatatctgcggcagccgccgcgccagcgtcacccacggttttaaacgcagccgcctgccgctctgaagcgcgctgcattcgcgtctggactttttcagagtcctcagccatcccggttagctggccctttatgcgggcaacctgctcactaaacgtggcgctgtcgacgtcaaggttgatgaccagatcgctaatctgctgggccatatcggatacctcctgttatcccctcagctgcggccatcagcgcatcatcatccggctcgtcatcgctgatgacgataccggaaggagaaagcaggctgaaatgtgcgggggtaagttccgggtcgcggaagaaaagagtggagatggaataaagcagctctgagaaatgcgcatcgagctgagcgtcctgaaaataatgctcccggtagaactggtgccagtcgcccagctcagtggaagtcattccagccagcatggcgcgccagtcgggtcgcccgaactcgcgcgccagattcaggacaaacttcagctcgctggcaagggcttttccgccgcaacgggttctgcgctttcggcctccgctggggcatccggatcggcagctttgtcatcctcaaccggaacgagcatgccggagagcagctttatttccatttctgctttaccgatcgcctccggcggccagccgctaagcacctgctggtaaagcgtctccacatccgtgccagccggatcgttatgccacaaagacatcgcaatcaaacgcgcaccgcagcgaatatttgagccaatcagcctggccgtcatttcctgatcgctgatgccgtcgctgtcagcgctgacggccttttcctctgcggccataaacgtgatgtactcaatacgctgaagcgccgacagctcgaagatggtcagtgattctttttgccaggtgaacttctcttttttcagaaacatgcgtccttccttacgctgcagttacggtaactttgcagaccgcaacgaaattaccgtcgctggtcataacaataacgtcagcggtgcctgccgccacgccggtgacggtgatcgcattaccgctaacggtgaccgttgcttttgccccgtctgaggttgccacacggaacgaggtatctgaggcactggctgggttaaccgtcacattgagcgttgtggttgcgccgacggccacgcttgccgtggctttatcgagcgtaacgcctgtcacggggatattcggggtcccgctttcttctgccagttccggcttgccggtattggtaattttcgctgtacgggttatgacctcttttgccggaatggctttacccaggctgctgcaccagccgcggaaaacgtcgacggtaccgttcgggtatttgattttgtaatagcgtactgagccatcaataaaccatgcgacaaggtctttttgcccttcttcgcccggcttccaggcgagggtgaacgaggtatcgccagcagattttgccccctgggccgtcgcgttccagtcggcatcctcgtcgtcgaggtaagtgtcgtcatacgattcggcggtcatttcgcccggcgtcagctctttaattttcgccaggcggttccagtcgatatccgagagtgggttagcgaaagcgttgcccgttccggtgtaaagccagagggtggtaccggcacctttcacaggggccagcgggtttggagtaggcataagtacctcttaaattgaataggtgattaagtacgtgaaatcgactgaaccccaggtggccatttcatcatcccgctgatagtcataaccctgcggggtgaacgtctcgaccagttcggtcagacctgggatgaaggccattgccggatacactttctcttccatccaggaatcaagcgcgctgtcggggctggaggctttaagaaatacctcgatgtgaacaaccgcctgccacgaatcttcgtcaagcgaatcgccggtgtactccgcgtcagaaaggtatacagccacggcagggagatcctgctcttcaagaaaaacagggcgcccgtcaaaccaggtgaccgtgtcggtgatctcggctttcagtttggccagaatggctgcacgaattgcgctgtgtctgttcatcgcttcaggtggatcctcagttggtttttcagggctgcggaaagttctttgggcatatcgctttcaataaggcgctttgaaatagcggtgaaggccacggtgagcggtgtctcaagaggaactttgaccacatcaatcggataacgggcctgacctacgcgccgcatgacctgccagcgcccgttcgcaagctgttggataaaagcgttacgaaaggtatagggcccgattttaaggacgctgcccgctccgtttctggccccttttttacgcgagagcctgacgcgcgccgtgccgagctttatcgcaggaagattaccgcggttgatttttatcgacgcgaccgggcgatcgtgacgggccttgcgcagacgggaacgctggcggaccagacgaaccggaagcccctttttccggttatcatcaactgttgcttctttcgctacagctttgctcccctggcttatcgttcttctggccaccctgttaagtgcttttgcggttgcctcaggaacgattaaccggctgaggctgttcaggttctgaatagccctttccagtcctttcacagacatagcgcctcctcattcgagatggatgcggggttttccgttgaacatgtcatagcgggtaacgatcaggttcttaccgtcgtagtcgacgctgtcgtttcggcgtggctggtaaagctcagagaaaaccaccagcgaagtacctgttcccgacaatggccccatttcctcgagttgctcggcgggaacaacgtcatagctgctgccattgatgatcgctgtctttcccatcttttttatagtggccgcgtccatgcgcgccgccatccggtcaaaggagttaggcattgatcttaacttcaacaacggtggtgtttgcccctgcatcttcccaggcgatgcccgcggcaacggcgtccgtttcttcgatcgtgattttgccgtccttcagatacacctgcgccccggcagtaaccgcatctgcggatacttttggcaggaggaaaacaccctcagtaaaaccgtccccggtatcgccagccgggatatcggtaattgccaccgcgataagttttccaacaacaaccgggtcgccgctgtgaacatcggttgcaccactgtttaccagagggatcgttttcccgtcctgcgcatagttcttagccataacttctccattcagcccctttcgaggctggtttcaggtataaaaaaagcccttacgggcgtctgtttgtcaggactgttttttactgaccagaggatttggtcatgccgcgatagtccagcggcgccacgccagcatcaatacgcactttcgtggcgataccatcagtggtgaagccttcctgctgatcgatgtatggcgtgtcgacgccgttgagataagcgacctcaatggtgtcggtgcccttcgcggcagccagataccaggctttcgcatcagcttcatccagacgtggttcggcaatgacttctgcaaagttctggatagggttaacgatcccggcattgatgtctgcacctttaacactggccgacttgatggtctgatttgccagagtttccagggcgacgggcaccagcatgtaggccggacggatattcagggttcgctccccctccttctgcagacgcatcagcttgcgcgattcgtccaggctggccacagaaattgcacccgagctcaggttcttgtgatcggcatggaacagcgcctttccgtctgagagtttcgggtttttggtcagaatggcgtaaaccagatcgccaatcgttgctttcgccgcgcgccccatcttcatcggtacgtcggtaagctggttcagatcgtcgttgatgatcgcctggcgagttactgagaagatttcaccatacgtggcaagcgcgatggtttcgcctttgtcactggtagtgatgtacttgtactcagccccttcgcgaacctgtcgcagagaagggaacccacccataccgacacgatgcgccgttttgaagtccgacagctggccttttttggtccactgctcgaaggtttcctgcgcctcgtcccagccctgaatcagcgctttgttcgcaacatcaagcagaatgttgccaaagtcagaggtgctgtgggtcagcgccaggccaaccatctgcatcgggttgtagctggccacgccgatacctttttctgtcagggccatacgcgcatactcgcgcagcgtcataccgttataaacgttatcccgctcctgaccttcgaacccggcacgcgccatcagtgcctggcgaataccatccgcgacgaagttaccgttgcccgcatgaatatgcggctgagtggttttattggacggcgtggccgttttaccgagttctgccagcagcaaatctttcgccttatcgacggagcaatcagggtcggccacacactgattctgcagttccatgtgcttattaccgaacatggcaaagagatcgccgatagcgttaacacgggttttctgctcagccaacacctgcgcgcggatcgcattttcatccggtgccgggtctgtttttgcctgcggtgcctgaggctgggtaataaccgggtcacgctgggtagtgttgcgcggcggggtgatcatgttgcgaatgctttttggcattttttcaaattcctcaatacgttttgaatgaatacaggccatagcctgaagggatggtgtcacctggtcggcaaaacccagttcaaggcactcgctgccgttcatccaggtttcgtcctccagcattaccgcaatttcttcggtggattttccggttttctgtgcataagccgggataagaacggattcaaccttgtcgagaagatccgcatagtcgcgcatatcgctcgcgtcaccaccagcaaacccccagggcttatggatcatcatcatcgtgttttcaggcatgatgaccggattgcctaccatcgcaatcaccgaggccatggaggccgccagaccgtcgatatgtacggtaatcgccgcgccgtggtgcttcagcgcgttataaatagcaattccgtcgaagacatcaccaccgggcgagttgatataaaggttgatgtgggtgacgtccccaagtgcccggagatcattgacgaactgtttcgccgttacgccccagtacccgatttcgtcataaataaaaatgtcggcctcactgttattgctggcctgcatgcggaaccacgaattactttttgcgctggctttcggacggtggcgcgcccggttctttggcttcggcactggtgcctcctttatcattggcggggtcggtgtcaaacaccaggccctgttcacggttctcgtcaacctcagctttacggcgtgacttaacatcatccgggttgcgaccgctggcacgtatccagtcggattcagtagcagcaccgccgcggatctgcgttttccaggcattcgcttctttaacgggatcaatccacggcataacgggccccgaataaaccgcgttataaagcgagtccatatcaatgcctctcggcagcttgatttctccggcagcaatagccatcttgagccaggctcggtacatgggccgggtcactgaaccgatgaaccagtcctgaagaatcagatagccgtcggttgactcgacaagctcctgccgctgggcactgtacgttccgttgtagtttctggatgtgctggaaaagctgaggcgactgccggcggacacggcacgcagctgtccgttacgaaaagattcgaggttagggttcgggcgatcggatttaatcatcccgatttcttccccggcctgcagttcgtcatagagcataccgggctgaatcatcagctcgcggtcatcgctgcttgaatcagaatcgaagctctgtccgtcgccttttttgatatacatgccgagtgccgcagcaattctggcagcagtaagctccgagtcctcgtattctttcagcgcgctcagacgcatcagaacaccagacaaaagagacgttccgcgggtctggtgcaggcgtcgggtgaatttgagatgcagcatgttctctgcatctatctctttggtatcaaactgacgcccggatactggcaggcttttatagacctgatattttttcgggcgtccccagttatcgacaaaaacgccctgattgagctgggtggcagcatcgctgttcatcggcacaaagtccggctccagcgcttccagccagaacggcacgccagcaaccggctgaagaccatttccggtaccgcgaaccagctgagcaaatacctcaccgtcccggagccacgttcgcagcatcagccgctccagcattgggcgggtaaactgggttgtgacatctggccttacggaccattcgccccactttcggcggatatcagtggccagctttttagcgatcttcccgttactcagcatcggatgcggttcaactatgatgcccttcgcacccaccaccctttcttccagcttgtcgaaaacgccgatcaccagatcgtggttgttatccagccagcgcgcctgctgcctcagcgaaaccgcccccatctggctgagctgatcggctgaacgattttccttctgggctttgtgggtacgcgtttgctttaccgcctcatacgctttaataactgcgcgggcacgcaggcgtgaggctttccagcctggtgaaaacaggccaatcgcatcatctaaaaaactcatccaaacctcgccagcctgtagccgggtcgcccacggcgtttgttattgagcgttgccagtcgtcgctcccattcctgacggccttttctgatttccgacaggttttcgagcgtcatctgctgcccgttgaaagtgattgatttcccctccagaacagacagctcggctgcagcatagcggtcgatcatgttttgaatatctgctggattcacacccaacctcctgacgaagaccacggattagcctgctcggttacgggcttctcacgttttggttttggtttagatttcggcgcaggcggcggggatggcatttcgccagcttccgtctgcgtgtcctcgatccacgtttcccgccgtgcccactcaggagctgacggccatttgattttttcgtaaccactaaggatggcgagcgcgtcggcataaacgagcaggtcaaatgcttcgtttgcgccccggccgggcttactccatttcccttcattcgagcgttcctcatacgtcagttcgtcatagaaccagctgcccagccaggcggggaaatgcacatagccagggccgggtgaatcacgccacagcgcattattcacccggtctttaagggcatcggtctggagaagataaagaggcacatcaccagtcgcctgtgcgcggcgcgttgatctgcccgtgttgtcgggaaacgttcgctggataagtttgctgcgcctgacgctgtcccctttgaagagatagatacgcttacccagcccctcacggcgacatctgcgccagaacttgtaggcattatccgtcacgccatcttcgccccctgagtccacggccatcgacatcagccgcatgccctttgatgggtcagctgcgagcggccacgttttatcaaagacgtcagtgagtaaaagatcccagtcctccggatagctcgccggatccacctgaatgctttcaccgttgccgtcgcagcgcagcgaatgccggatgttgtaacggtcaactatccagcgctcacccatacttccataacccgtaatctgcacaacaaagcgccggttgcgcccggcctgcacgtccacggtcgcagtgagaaactgcacgccgttcggtaccgaacgttttgggacgtcttcggcacgctgctcgagcaattcacttttacgctgctccatgctggctcgcggcaaatagggcctgccgaaatcggtgttgatcaccgtcttcagggtttcttcgctgcgcgtggattcatattcctgctcggcggtcagaaacttataaataagctgcgcccaggtctggtaagcagctgccggaccttccatccagaaggaggcaatacgggaacgacggccatcaccgctaaccaggcctttcctgtcgatggtttgcccgtcccggagccagacacatttcatgttaagcgcacgcttcatgtccggtgtgatcctgcctttacaggcagggcactgaagaaacgccgcttcgctggcaagcacaggatcgctgctgtcgcggtatccggtcatattgtccatttccggctggaaatattcgccgcaatgcgggcatggccagtaaagacgacggcggtcaccacggttatagagcgataaaattccggtggtcggaggggcttcatggggcgtggagcgccgccattttgtgtctctgatatccctcccgggcgagctctcaaccagcgtcatcccggaggacatgaatgtcgtggttcgtttcgatgccagtgaaaaagcatccccctccccgtcgatatcttccggaaagcggtcataatccgtcagcgccacacttttatagtccgaggacgacatgatattgacggatggccagcccagcttcagatagttaccggcgcggaatgtacggtcgtagacgttgttatcgttacgtcttgggcttagccgggttttaacttcagggctacagcgaaaagtacggtccaggcgttttttggaatgctcgcgcgctttttcctcagatacctgaattacaagcatatctgccggatcgcagacaatgttataaacgatccagccgtcaatcagcccgatggttttacccgttcgcgctgggcccacaaacacaaccgcatcgtattcacgcgatgccagacagttcatcggctcaatcacatagggtgccagatccggatcccacggaactgagtttcccgcccccattggcacgcgcatataagtactgaccgcatcggccaccggcatacgacgcggggctcgtaaaataccggaaacatcgcggcggatgtccctggcggatgcccgctttgccatcagtcctcctcaggctgctcctcctcttttccagcgtcctgcaccttctccgccatctggtcgcgcagatcatcgataacgctttgcacacgaactaccgcagcaggcgttaaagcacagtcgcgctcgagcacatccgggagggtttcaagtaccatgacgacggctttcgccatcaatgagaattctcgcgccacttcatctgcgggtattaactgccccgtatcctgttcgaacttcagcctctcgttctctgctttccagtgggacagcctgtcagaagggggcatatcgtcgatgttggccgaaacggtagggatcatcagttcggtcagaatgtcggtcaccagatagagctttaacttgctattgctgcctggagcaggttcaacatttttcagtctcgcggcaaccgtctgacggtgtacgccggttatccctgccagctggttgatattgagttttaaagtggcaatttcctggtccatgatggtgaacactttttgaacgattcgacatgttgcgaaaatggcctctaattaaatcaaagacctgcgcacatgatgatgatgaccctggatccgaaaaactagccgtttcccgcgagcacgccgccccgtggcagggtccccctccgggagtaccttttgataataattatcaattgcacactatcgacggcactgctgccagataacaccaccggggaaacattccatcatgatggccgtgcggacataggaagccagttcatccatcgctttcttgtctgctgccatttgctttgtgacatccagcgccgcacattcagcagcgtttttcagcgcgttttcgatcaacgtttcaatgttggtatcaacaccaggtttaactttgaacttatcggcactgacggttaccttgttctgcgctggctcatcacgctggataccaaggctgatgttgtagatattggtcaccggctgaggtgtttcgattgccgctgcgtggatagcaccatttgcgatagcggcgtccttgatgaatgacactccattgcgaataagttcgaaggagacggtgtcacgaatgcgctggtccagctcgtcgattgccttttgtgcagcagaggtatcaatctcaacgccaagcgtcatcgaagcgcaatattgctgctcaccaaaacgcgtattgaccaggtgttcaacggcaaatttctgcccttctgatgtcagaaaggtaaagtgattttctttctggtattcagttgctgtgtgtctggtttcagcaaaaccaagctcgcgcaattcggctgtgccagatttagaaggcagatcaccagacagcaacgcgccacggaaaaacagcgcataaagcacttcattagcagcgccagatagcgtaatgattttgttactcatggaatatttccttttaggcgtgagcctgtcgcacggcaatgccgcccgagaggtaaacgcaacctaacggcatcacccaggctcactactgaaagactctctttgatgtgcgcgtgcgatgcgcgtagaagactgatttatcaacctgtctttatatcaggattcattacctgactatttgtgggtaaagttcgtagtgcgctgatcgtgcaaaatgattttagttgggaacagttcgcaactctgtcccataaaaatcagcatattcccatctatcccatatccagcgcattgaccatcgggatactgaagggagattccatcatctcttagaaagatcaccatctcttttgtttcaatttgcatatagctacctggaggatttatgaatgcaaggattttcatggactattaccatgagattgattttccatctttattcgcgagagcagtggaaagcgatgacgatgtgggtactacattgcgcattcacctactttgtgagcgcatggtcgaagcatggatatgcgcatgctgtgactgccaagatctctttggaagagataaaaacaaacttttaatcgaatgtaatactaaaatatccatggcgggaaacctgggaatccccccggaacttatgaaatcacttaaaaccatcaactcaatgcgtaatgaccttgcacacaatccatcaatacaaagcattgctgattcaaggatccagagcctgaaggatactctgactgaatactttaaacagcatccaacggaacccagcatggaagaatcaaaactgggtatttttaacgccgagaatcaattaaccgaagaagtttccttagatagtgacagttcaaaaaacagacttaagttaatcttgctgttcagcaagttaatgcaggcgttaatgcaattagttgcagctaatcataatgggcgctgggataaccaatttagccaattcgtttaccatgtgaccatgaacgcaacaaagagataaatccaagcccgttttgtacgggctgttgcattatcacaggcactcagtgaatgcctgctgtaatgccgctagtcgtcgagttgcaacacaccgtgatccagtgattctgaataggcgataagtccggtataaccggggataatctcaccattatcagcttcaaattcaggaattgtgccggtggtgatggtgtattgaggctggccatcttccttcgcgaaggctgccaggtcttcaatctgcttagctgtaagaactactgtcatgctcattcctcagttgtaaaaaagccccgcgagtgcgaggcgatttgattgaattctcggctcttatctcagcgcagccccttactgcgtgccggttgctcggtgatgagcatcagcgatgagacattaaagccgaccgaaggccagcggcgttcctcatgttgccgacagagccatatcgacaagaggacgaaaactagcagcatgaatcgcctattggttattcgacagtcgcactgattcgtaaatccgctcacacgtcattcctgcccggtagctttcgtcagatcgtccagcataatatcgagctgcttctgcaaggcttccgagcatgtcggcaagcattgctgcgttggctccggctgttttgcttctgacggaagtggcgagatctgcggtgtgctttgcggcgtccatgtgggtagcgagttttgttgcttcggcgcgcagctgcttaacagtggtagccaggccagcagaagtaacggcagcgctcgctgcttgagcttgagcatctttaacggcctcatcccgggcgattgttcgcccttgttcaatcatacgagctgcggtctgtgcattcgcttcctgtgaagattccgcgctatcccggtcagcccactttattttccagctgcggttcgtccactcactgccagcgagaaacgaacctaccaacgcaacaatcacaatgatgcagatgccacccggcttcactggtctatcccccagcacgtcagtgcgctttcctggtcccgccgttctacctgcccataacatccatccttctggcccttggtcaggcggcaatcgcggccaccgtctttaatccaccagcggatagcttcacaggctcctttcgtatcgccagcattaattcgcttatagaacgtagacgggaaacattttccggggccgatgttatatgggcagaaagaagcgatacccgctttctgtggttcggtcagtggtactttgatatttcggtcaacccacgccagcgccttgtcgcgttcaatggcgtttacctgggcgcatttctcagctgacagcttcatgccctgtactactggcttgccatcaaccattgttgcaccacggcaaatggtccagagtccgccgccgtcgcgatatgctgtcaagctgttaccctctttctcatccagaaactgatcgagaatcacgggtgcggaagccccggcaagaatcaaaccaacgaccgctgcgctcaatttattcttcagctttagagacatagccattgcgccgatcctcccgttctttccagcggaaataccagttcactgcacaggtgattaccgtgcatgcgataccgacaataattgcccagtcgctcaggcttaaccctgcaattctgtcggccaacatccaggacacctcttttgctgttttagctgtttcggcatatgccttcgctgatacaccgcagccggcaagcgtggttcctgatccatatgaaagtctgctgtaaatggtgctcattctggtcatagcctcacctccgatagttcggatggcgctgtgtgtgattgaaggggatcaggcaaccgggctcttatgttcaagtaaaaattaaggatgattcccggtgcctgaagatggtgatcaccacagcaacgggggagcgtggtgatcgttatgattttttcagtttttccacctcttcggtggtctgtataaacctgtctgcctccagttctacgccgatcgcccgacggccaagttctattgcagctttcacagttgaaccagagcccataaagaaatcggcaacgatatcccccggtctgctgctggcgctaatgatctgtttcagcatgtcggcaggtttttcgcatggatgtttgcctggataaaactgaacaggcttatgtgtccatacgtcggtataaggaacaagagcggaaacagagaagcagcgccgaaggattttgtattcctccagcaattctgaatacttgcggtttaatgactggtaggtagccaccagctggtggtgaggatgttcaagcttttgctgaatatgtttatcgatggcgatccgcgtgaacagttcctgcaattttcgatagtccacttcattcggtagttgccattggcttgcaccaaaccagtgtgacgccatgtttttctttccggttgcctcagctatttctttcgagctgacacccagtgattcacgggcattacggaagtaatcaatcagcggcgtcataatgtgctgctttagctctgtgcttttcctttcgtaaacatcctctttacctgtatacggtccaagatagtgctcagcaaacaaaatccgttccgtagatggaaagtacgcacgcaggctttctttattacatccattccagcggcccgatggttttgcccaaatgatgtgattcaaaacgttgaatcgggcgcgcatcataatctctatatctgaggccagtcggtgaccgcaaaacaggtagatgctgccagcaggtttaagaacgcgagcatactcagccaggcagctatcaagccagcgtaagtagtcctcgtcccccttccattggttgtcccagccgttgggcttcactttgaagtacggaggatccgtaactataagatcaatagagttatccgggagggtggcgacgtaatgcagactatcagcgttgattaactcaacactgtttatttttacagtatttttcatagatcagtaagcgtaactctgataggctcacgttgcttttgcgctaaagcagtgggccttggttagcttgtgacctgaaagcatgagctgatggctggccgggtgcgctaacacccaccagccgcccatttccacagcagaaaacccccattactggaggcgtttataacatccgaactggtaatcagataaccccgccatcaccagctgcgtaagtatgagctggcaacgttcgtggctgaggtgggtattctgtgcaatctccccagccgttgctggtttatcgcttaattcattgaaaacagcctttgccgtttctgtcatatcttcctgatttagcatgtcttttacctaaaattagttgcgtgacatacagataactctggttggtgataccagcaagagaagaatttgattctgcaaccaacaaggcctttaggcatcaggcaggaatgagatgcaataaaaaaaccacccgaaggtggtcttatatgaatctttaacgcggacttagcaaatattccacatcatcgtactaccgttatggttttcgataatttttgcggctgggctagtaccaaaagagtgcatatagcaatgatgaatagtaaggaccagatcctgcaacgtttggtcactctctagctccatgatatttaaaccaatattttgagctttgtccaaatgaatatgtctggcatgtgcatacgttgcttggtggttgtttaactcatcacatatacgcttagccttagcttcagcgtcagcctgacctgcgaacataccagtacaaagccatttctggacaatttcgttcgcccagagaattgctttttcacactcgccaatcaacgttggatttagtttttggaacgtaaattgccaccattgcagtgcagcagggttggcaaaaatttccgcttttgctctctcatactcctcaataattgcatgagatgataacccattaaactgtggatcaattggccccaagttcgactgtttacctaaaacgatctgctcagcacaacaagcaagcattgtgccacaactcattgaaatcataggtacaatcgctcggatattggttccgaactttgaacgaagataatgaccaattgattctagagctgcgatatcgcctccaggagtatggagtaagatatccaatcccagactcgtatctaacccattgatagcagacataagaccatttttatcatcatctgacatctggatcagatgttgaaacccaggcccccctttttgaaggaagcctgagtaataagaaattacatttcggccagtatgtttcgataaatcacgtaagtacttgtggcgaacctcatccgctggtgtacgttgagcgatagtacccatctcacccaatacgtctatccaatttggcatgttatcaatttatcagtatgagtacagttggtgagattgctgaccgttctgctcagtagtatttggtgttactgtgctgtatgaatagagcacaccacttctcacattcagatcgttttgctgagcgagaacacgcatagcaaaatgctgtacggattcgcctttttgaaactcttggggttgtatgcccattttttcgtaaaattcagcagcgctcatgatatgtccctcgtttttttctacatctatgcaattccaggagccatcaacacaagatgtagtagttagcagtcgtcaaatacacgaaaagcctcaagatgaggcttaaaaagattctttttgataaagatttagccaaactatagcggtcaaaatgcagatttgacaagtataaaaagcacttaaagcctataaataggcagtttttgagaattaaagcatctttaatgaggttgaacaaaatgcagtcttgacgctgaacaggactttactggaacgtagagctaaatggttcgatttcatgaaccagttacaaaaaaacccgctcatcggcgggtttataaaactttggcaacatatcaaatatgcttcaaatatggcttattttgttgcattttgcaagcgtgtttgaaggagatggtgaaatttacttcacatttctgccactttgagggcttcttcttcctcatagtattcaagagccatggccaacgcagattcatcaagctgggtaaaagcggcctttaacccagcccagtgccctgaatagacacgcaaccatgtcgaacggtcaacgctaaccatgcgggccaacgctgcaccagcatagtctttataggtttcattatttctggttgcggcaatttcctgccctgccagccataccaggcctatcagtttctttactacgcgctcctgaagggagttatcacccaggcatttctgataagttttccagacgtattcacacatcatcacctggtgcttatagctaaggtcaaaaccgtagcagtaccgcaaccaggcctgctggtatccactaagcgcggacactgccctacgccacggcgcggactcaaattccgcatcttttatcggcggcattggcctgcggcggctgcgtgtttccagcacatacagtggcgcggaaagtgagttaacaaagcgtggccccttctctccttcgagttcgacgagatgaattccacggcgaggggtggcatttttgtctgctggtgggtgttcactgaaagcctcaagctgcccttttgttcccccagacaggtcaggtagcgcgcggcgcaattctattcttacaaaattcaggtcttgttgattcatgcttctttgcgctccatacacttaagctttcgcaattacgccgatcgccagcgcccgatccataaaacgcagtagcagctcaagctgcgtaccatgcttctgctcgaatgccggtacatcggcgtgtaactcgtcgtggcactctctgcacagagggatcacgaagagatcatgggcttttgttgctgtcccccccataccgtgccctacgatatggtgcggatcatctgctggccgtcggcaacactcacagggttgtgttttaacccagcgggtgtacgtctcatttatccagcggcgtcgctttggcctgagcatgaaagattctggagactccggatcaacagagagcgtgaggatcttcttcgccttctcctgcacgaggctggttgcagaagcggaaggcacaatgtcgctttccctcatgaccgagcggatcttatcatccggaaggcgtagccccttgtgcgcaacgctttccggaataacatcagccaggtcgtttctgaccatccaccagcacagttccggaagcgtcaggatatgcgactcgggaaaaccagaatcacgccgaatgacttccagaatccaggataccaggtttcctgccgctatacctgcaagctgttcggtatgctgccccgacaaagtgtgatcgcaatgccagcacaggcgaatacttcctggtgggtgccgcattgttgtgaagttcttgtcgtgccacgatgaatgtggccactggcattcaaaccgattactcaaccattgctcaagggaaggaagcccaccagcacgctgaataacccgatcattctcgaagacctgccgcattaccggatcatcagccagcggctgaatggcggcgggaacagctcctgtactgaatgacgccatttcttctggttcaggctcaagcagaacgcgaccgcgcataaagaggtgcatcagttccgcgccgggacgaaacaacacaatccccatacgatgggcgatctcgggggtaagcagagctctcacgcgacctgccccctggcaatgtgttctgcccacagtccaccaatccagcgcacgcctttcgccgtgaaacgtgcctggctgaatgcatgatttgaggttacggatgtgccggttttcacttcaaaacggcccgcatcaatatgctgatgccgtggggtcatcgttccgccaagacgatacatgatgtcgttctcaaggaggaataaccgcagatcgggctctttggccttaagcagttttgccacctggcggaatgacattgacccactggctgtacagtaccgatcaacaaacgctaccttcggcgccgcggcagccagttcgttagtcaactgctgtttttgttctgcaaggtcagctgcaagacgtagggcttcagagaatgattgaggaatcgtctgctgctgtgcctgctcaagctcctgccagcgatcaaccagacgcgcggtaaactccggcgacagctgcgcgacaacgatataactgtcccgcttccctatcagataaaccgataccgactgattgaggtgatttttaacttcccccattggggggagttcaataacaccgcgctctgccaggcgttcaatggaccgtttaacatggtcatgtcttgattccaccagctcagcaatatcgctgctggacatggttaacgctgttgttgctaactggctcatacttttctccatatcaggcggctgcacccgccggttcatatctgctgattgttatctctacccgacctttcggcacaacgggtccccattccaccagcatgcgcttaatctggctgtcgtcttcccagacacccgcatgcgtcagcgcgtcaaacagggctttgttgtaattatcgatatcccggcggcgcgcatccggcgggtacagagtgatttctaccgctgccagttcagtcgatggcttcgggagacgtcgtaattgctcaatgatcgccacgcaggcagcgctctggtatttacggccagcggcgctaatgaggtgacgaccggccagcggccccttgttaggggcgcgccagtaagtgttcacgctcggaggaaaaggcaggatcagtttcacgcggcctctccccgcatattgcgaacaagttcagaagcagcagtaatgatttcgctggtggcagtccgctccagccagagttgattgatattggctttcagcttgtgttgcagtgactcatccagcatgtcagcaccatccacctggtcgaatacaattctaacctccagcggccagatacgggactcgggaagcggatccgatactggtttagctttctcacgaatgtgcatgcggatctggcgaatattggaccaactggaaacatccaggcttcccatggctgcaatgaagtcagtgctgttcatgccatattcaccggatgcttcaagggcaacagtgcgaatacgttccgacatatccaggcgcacagcagcgtcatcgaattcaatcgacaacagccactcatccacaccgaacaaaatactctcacgaataagcagcttcgctttgtcgatcgttaaaggtgatacctgagtgaattccggtgcttcgacagaatccgccgcccaggtatgcccaaacttcgattcactgaatgtgtattcttctttatcgccaaacgcagctctaacgcatgcccacgcctcgacaccgctgatagcaaaaatatctttctgggtgagtggcaactctgcttctggcttatcagctgcaggaggtgtggcagttacaggttgagacttgctggcagcaaattgtgccaaagccataaacgcccgcccttttgcctccagttctgtgcggttgatatagctgaaccgctcgccacgccatgacttatcgaatacagctatggcaccggcaaaaaacgcgctggtgggtttctgtttttcgtcagcaggtacaaaccacacaggcagatcgaacccaatgcgcccgcgaatgaatacaatgtgatcggcatcttccggccaccacgtttcactcggcgcggcttttatcaggaatacatagcgaccgcccttctcgcgctgggctgctgcgtagttcatgatgtgcgtcatgccggtgatcgcctgcttctcgtggtactgcgaacggctatacggtgggttgccatagccagcgccacccagttcagccagacgttcagaccagtcctgcgtcagcgcgttatcttcggcggtgtaccatgccgggcatttcgcgttgtcgtcgtcagcaaacaaatccagaactaatggaccaaatagcgcgttgatcccccaaaaaagcagatccggtgtccgccactgatcgccaacctctttcaattcgtgagctggtttgctacgcagtgccgccagcgcctggcaatatttattggtcatcatgaacggaaccccgaattttctggcagtgagtaatcaacactctggaagtttgcgcggctggctgagttagtctcccatttgccgttaacgcgttcaggccggccagcactggaccatttggtcgcgctttgcaggtaaccagggaagttttttggaatgaacagagttgccgggcggaggtattgcgcctgctcgctatcacgccaatcggcatttttgtaatccactaccaagcacaggtcatcaacagtgaattgttcccgaagacgggcgcgaatattctccagcgacgtgctgcatacctggtagcgtgagccagtagtctgattcaggtaagacaaaacctgtctggcctgatcagtaatcacaacctcagggtcgggttgcgccgcaaccggacaagagggttttgaagttacttgtggttcttgttttgattttactgacggatccccaccagattctgacgggtcaaaaccgccttttttgctggatttcgacgcctcaaattttgacgggtcggattttgatgcatcagattttgatgggtcagattttgatgcgtcagattctgacaggtgagaaaaagcagcctctcgcaacttaacgacgttaagctgatatacgttcgatgcgttacggttcccattacggcgctgcttacgggaaagccagccatccttctcaagctgagcaagggccgtccttaccgtactttctccagcaccgatttgacgtgcgatcgtgccaatagacggccagctaacaccctcatcactactgaagtcggccagacgcgccatgatggcaacgctggataacttcatgcctgacgaagcgcatgcatcccatacgtaaccggttaatttagtgctcatggtcgtcctttaattctgtaaatttacgctggaattgttcaagagggctgaagcactcatgatcgtacccttcgcgaaggtatataacgcgctgtgtatctggctcccagcggacaactctgacgggaactccgtagtgatctctgaaccgccggttaacttcagccattcctcgcgccccttctcgttcatctgaacaaatgcttctaccatcaagtctgctggctggtagttgcctccatcagccgcgttatttatgatttccacatagccgaactgggcatctttacccaccagcggcaaacatctgaattgcttagctggtctgaatcggtttacactgttcatgcgttagtttctccactgatacgacacgccaaggcgcccggagctgcacactcgcgggcgtcaccttttctgcctgttgaaacgaatacgtcaatcgcctgatctgaaacaccaaccccataaagcgccataaatcccaggaacccgtgaatctggtggcggagcttcttactgaataattctgaaagcattttgcgctctgatgaatcaattaccccatcagccgctgctgccatcttggcattagccagctcaccagatgctgctgccgctttcatctcaatgctgtacagctcaacgttatccaggctctcagcagttggaacatccaccagccatttcccttttcggttcgcctggtactcggccaagtaacaagaaccagacaggtcctccatccgttccagttctgccaaggtaaagaaccgactgccacacttctggtacaggtggttgtggaactggtcgatagtcatccctaaatcggaagccatacctaagcgaccatgcttgtgtgccttacacatcaggcggattgctgtatttatgctgtctaccatgttgatttccctctggtagttaataatcaacttaaagttgactattgttgttagcggaaggtatgccgtcatttttgttcggataaatatcaggtcgtaattgatggggagttactacccatccgccccattggcagagttgaataactctttcagaaggtactcggttctttgcaatccagttcgcaacagattgaactgattggaattcaaaccgccttgatacctctgaaatcgacccgatcgccttcacagctttagctgttacattcttgtgttgagatgacatgtgttctcctatgactaagcctgcatcaatactacttatagtagcaattattagcaacttaaaatagaaatgacaactatgccttgtgcgcttaatcttctacttatggtggaaaatgctaaatacaaagactttgccgaaaggctaaacaggtctctccaagagcaatctattggagttaaagaattgtcagagttcagtggtgtctcgtatgagatggcgcggcgctacactcttggtactgcaaagccgagagatgagaagatgattcgaattgcagaaagacttgccgtctcaccggcttatcttgattatggtgtgcctgttaatggtggcgacgcgccagccaaaggcacggtcagaatagagcaattggatgttcatgcttcagccggttccggatatataaaccaaccattccctacaatagtgagctcaatagagattccagaagagaggatcttcgagttgtttggtcgtagaagccttgatggcatcgtcatgataaatgttgatggcgatagcatgatgcccacgctttgcccaaaggacctgcttttcatagacagcaaggttgaacaattcagcggcgacggcgtttatgtgttcaattttgaagacagtacgttcgttaaacgtttgcagaaggtaaaagggcgccgactggcagttctttcagacaatgaacattacccgcccttcttcatagaggagcatgaaatgaatgaactatacatattcggcaagctaatcagatgcttacctctaaaaatgatagagtttggctaataattaattcatcaagaaaccggcgaaagccggttttttttacgcctccaattcctcacctcataacactacactactaaaaatttcattttctactttttgttgttgcaattatctacttaaagtagctatagtcattgcatcgaaagcgaacaggcaggacgcccacgaagtagccgccggtggcatatgaataaccggatgattcgctgacagaaaacttaggttgggggtagaggtttacatgaatcatttattcacatgctcattttgcggagcaaccgaactgggagcgataaagatcgtcgcaaaaggtggtaaggacgaacctgccatctgttcggaatgcgtagtcacatgtgtagaaaaaatgatcctgactaaaaaatcagaggctgaaaaaccaacctctgataacgaaataatatcagtcgataaaaaactatttaaagagcttcttcagcttgtcctcaaccttcctgatttcggaagtaagctggctgctgttgacattgatagtagctccacatcgacaagtgaaacttttgttcgacttgagccaagcgattttcttcttcgtcttagtgccgcacttagggcatgcgggtaacgtaatttcctggttatcaaaagcgcccataaacatccctcttggttgtgtgagaacaccaagataccaccgcgcctgatgtggttaaaagcaggctaaagcaataacaagtaactccctgttctggcggcccggtgttttcccgtgtatttccggtaaccgccagcctttttcagggcacaacagaaaagggcatcaccgggcgacgggctcataacccaatccacccgggcaaaaagaaagcggtctctgcaagccgccgaccaatgcaggtgcccttctctgttgtgtatggagaaactaactttttagcgtctgtgcagatgcgctgaggaaccgagaatgaataatccgtttttcaaaaatatgttggtgtatcgcattagtcgcgatttcaccatcaaccaggaagagctggaacagcagcttgaactatttcgcttcactccatgcggtagccaggatatggcaaaaaccggttgggtatcaccacttggtcagctgtcagatcgcttgcatcacactgtcaataatcaagtgttgttggttattcgccgggaagaaaaaatactgccatctcctgtcattactgaagaactgcgcaagcgtgtgtcgcgtctagaatccgatcaggggcgtcgcctcaaaaaaactgagaaagattcgctgcgtgatgaagtgttgcactccctgcttcctcgggcgttctccaaaaactcgactgttggtttgtggatcaacgtcaccgacggtctgatcatggttgatgcagccagcgctaaacgtgccgaagactcactggccctgcttcgtaaaactctcggttctctcccggtggtaccgctgactatggaaacgccgatcgaactaactatgaccgactgggttcgttccggtagtgcgcctgctggctttggcctgggtgatgaagccgaactgaaagctattcttgaagatggcggtattggacgctttaaaaaacagactctggtcagtgacgaaattcatgtgcatctggaagctggcaaagtagttacaaagctgtctatcgactggcaacagcgcattcagttcgttctttgcgatgacggcagcatcaaacgccttaagttctctaatgagattacagaacaaaacgacgatatcgaccgtgaggatgcggctcagcggttcgacgctgactttgttctgatgaccggcgagcttatctctctcattaacggattaacaacctctctcggcggcgaagccaagcgataaacaccaggcaacaattacccccataagcatgggttgggttgctgcacgctaaattcagcaattcattaatttaatggcgcggtgcagcgcgccaatatggagaaaaccatgagctacattcagacattatccggcaaacattttaattacctcgatatccaacaggacgatatcgtgatcgaggatattgctaccgcgttgtctcatatctgccgctttgcagggcatcttcctgagttttacagtgtcggccagcatagcgttttaaccagccacctcgttccgcaggagtttgcattagaagcactgcttcatgatgctgctgaagcctacctgcaggacatcccctccccacttaagcgcctgcttccggattaccaggcaatcgaagctcgtgtggacgcagccattcggcagaagttcggtctaccaactgagcaacacccaaccgtgaaatatgccgacctggtgatgctcgccagcgaacgccgcgattttgagattgacgaaggttccatttggccatgcctcgagggagttgtcccaacggatttattcattatcaacccagttcgtcctggccagtcatacggcatgttcatcaatcgctttaacgagttgatggagcagcgccaatgcgccgcatgaaggtaaaagaactcgtagcggaggcgtttgcctccgttgctgaattgccaccaaagcatgcgccgcttatgcgcgaagtcgccaccagactggacgctacgttcgcagcattaaaagagtctctggtgcaactggaacaggaacgtaaagataaaacgccatgaccgtatttgaatatctccaggctcatccgaataccaccagcggtgaaatcgccaaaggtatgaacaaaaagaccccagcggtcgccggagcattatctcagctctatggcaccggtcggatcgtgaagtctggtgttcgcaagggtattccaacataccgcattaacgatatgccgtttggttgcagtaacagcctaaccatgatgtttaaccagctcttgagcagagccagacaaggagcagcccaatgacagcactcaacaaacaggcgctgcgtgaagaattccagttcatgcaggacaactatagcgacccggcagaccacgatcggcaggtgatttacatcgaggcggaggcgctgctggatgagttggaagccaaagactcaacgatagcagcacaacaacatgagatccgtatgttgctgaatgcgcttgaggaaaaaccatgcccgaaatgcaacgacacaggaatgactgatagtggcggcacgcagccatggggcgagccgattgagattgaatgcgactgccgacagcaggatgccaacaccgcagaacttgtagccgctggcattggcgtgaagggggagtgagatggataaattaatcaaacctaccgccaaaggtaaatatgacggttcatgtgattatctttgctcggaagatgcgcgattcatcgttatgcgcggcgattatacggaagcggaaataattcaggcttctgtgtctcaagatgtaatcgactcggatggtgcggctgattttgcaagtagcgcccgctattatcagtgctggtacaaagttagcccaataggtggtcaggatggctattcaggctggcatcatcctcgtgattcgccgtgtcgcggtgcatatttcgcatcagttttgcaatgggattaaggaggactaacccatgacaactaacaaccacccggcgcacggtcctgtatcactcgatcgcctgcaccagatacgcgaacacctgctgcatgatacccaatactcaaacggcgggaacagagcctacattctcgctgatgtattgaaggtgattgatggggctattgcccgcgagctggtacgccgtgagcatgcagcgtggtcacaggctactttcggcgatgtcggtccagttggtccgctgaagcacctttccaaagaagcgctcgaggctgctgctgaaccaggcgaccttagcgaatgggctgacatgcaattcctgttatgggatgcgcaacgtcgtgccggtatcagtgatgagcagattacccaggcaatgataaaaaagctggctataaataaggttcgccaatggcctgagccgaaagacggggaacctcgattgcatatcaaagaacagtcagagcaggagaaaaaataagaatgtttagcctgattcggcgcggtcaaatctacacggacagtagcaactggcccgtaattatccatagctgtagtgatcactcggtccgaattaaacgcaatgatggcgagctgagaacgattagcatcaaacgctttaacgaagattttgaacgagtggagcatgatgagtatcgcaaaatatgtgccgaaatagagcaggaaacaaacctgaaaaacctacgtgcgatgcgtcgcggcaagattactgaatagccaaacaggagaatatttaacgtgaacaacttaatgatcgaccttgagtccatgggcaaaaaaccgaatgcccctattgtctccattggtgccgtattcttcgatccgcaaagcggtgaactgggtcaggagttttacaccgctgttaatcttgaaagcgctatggagcagggagcggtgccggatggtgacactattctgtggtggttaagacaaagctcagaagcacgatcagcaatctgtgttgatgatgcgatgccgatatcatctgccctatctgaactgagccatttcattaatcggcattctgataaccctaaatatttaaaagtttggggcaatggagctactttcgacaacgttatattgcgcggcgcatatgagcgtgccggccaggtttgcccgtggcaattttggaatgatcacgacgtcagaaccatcgtcacattaggcagatctgtaggtttcgatcctaagcgtgatatgccatttgatggggttgcacataacgcactggctgatgcccgccaccaggcgaaatatgtttcagcgatttggcagaaactaatcccaaccaccagcaacagctaaagttttccccgggtgcagccgggataatggagaaataactatgagcaatattttccagttagctcccaacgattgggtttgtgaaagcgttttgatcgcggttactgggctcaaacccggaaccatcctccgtgccagaaaagaatgctggatgattgggagggagtatatccacgtatcgcctgacggaaatcctaaaccttccagtgagtgcatgtataacagaaaggctgtagatgcctgggtcgcttcaatgaaaagcaagcaaccagggtgatttgatgccatgaaaaaggtaagctcgtatcgctcttgggcgtctggaggtaacaccaatggataaagtcacatatccaacaggcgtcgaaaaccacggtggcacattacgcatctggtttaattttaaaggtaagcgtgtcagggaaagtctcggtgtccctgacaccgctaagaacaggaagatagccggggaactgcggacatcagtatgttttgccatccgcacaggaacctttgattatgcaacccagtttcctgactcccctaacctcaaggcttttggtgtaagtaaaaaagacattacagtgaaagaacttgaagaaaaatggctggatctgaaacggatggaaatctgcgcgaacgcatttaatcgctatgaatctgtcgcaaggaatatggtgccgaggatcggaggtaatcgcctggtgtcagcagtaaccaaagaggaattgctgtatctgaggaaatatttgctaactggttatcagaatccgacgaaaaacaaagccccggcaaaagggcgaagcgttgttactgtgaactattacatgacgacaatggccggaatgtttcagtttgctgcggatcacggttacttagaggtgaacccattcgagggaattaagcctctgaaaaaagccagggcagaaccagatcctctgtctcgtgatgaatttattcgcctgatagatgcatgccggcatcagcagacgaaaaacctgtggtcattagcagtgtacacaggaatgcgtcacggggaactggtctccctggcctgggaagatatcgacctgaaggctggaacaattaccgtcagacgtaattatacgaaacttggtgagttcactctaccgaaaaccgaggcaagcacagatcgagtggtgcatcttatccagcccgcaatcagtatcctgaaaaatcaggctgaaatgacaaggctgggcaggcaatatcacattgaagtgcagttacgtgagtacggccgttcggtgaaccatgagtgtacattcgtctttaatccgcatgtggtcagacgcagtaagcaggtcggatttatctaccgggtcgattcagtaggcgactcatgggaagcggcacttaagcgtgcggggatcagacacagaaaggcgtaccagtcacgacacacctatgcgtgctggtcattatcagctggtgcaaaccctagttttattgccagtcagatggggcatgcgagcgcgcagatggtgttcaatgtttacggtgcatggatggctgacagcagcgcagagcagatcgcaatgctgaatcagaagctggcagattttgccccattgatgccccatagccacgagaacagtacgggaggattattaaaatcagtaagttaacccctaacgcccgtcatgttaactgtgtggagggtaacaccacgctttatgccctgccgaaacccgaggttgtcctgcgctggcgtgagcagaccacagatgacttccgcttctgttttaagtttccggcgaccatttcgcatcaggcagcattacggcattgcgatgatttagtgactgaatttttgacccgcatgtcaccgttggctccgcgcattggacaatactggctgcaactgcctgccacattcggcccacgggagctgcctgcgctttggcattttctcgattctcttcccggtgaatttaattatggggtggaagtccgccatccacagtttttcgccaaaggggaagaggaacaaacgcttaatcgcggtttacatcagcgcggcgttaatcgggtgattttagacagccgcccggttcatgcagcacgtccatacagtgaagctattcgcgacgctcaacgaaaaaaacctaaagttccggtacatgctgtactgacggcgaaaaatccactgatccgttttatcggtagtgatgatatgacgcaaaaccgggaattatttcaggtctggttacaaaaattagcgcagtggcatcagaccactacgccttatctttttttacatacgccagatattgcccaggccccggaactggtacataccctgtgggaagacttacgtaaaacgcttccagagatcggagcagttccggctattccacagcaatcttctcttttctgaatttgccacctatcatagacaggtgccatcggccattttaaagggagtttgtatggtaagcgcgctgtatgccgttttaagtgcgttgttattaatgaagttctcttttgatgtcgttcgcctgcgaatgcagtaccgcgttgcctatggcgacggcggttttagcgaactgcaaagcgctattcgcattcatggtaacgcggtggaatatattcctatcgcgattgtgttgatgctgtttatggaaatgaatggcgcagaaacctggatggtgcatatttgcggcatcgttttgcttgctggtcgtctgatgcattattacggttttcatcaccgtctgttccgctggcgacgttctggcatgagcgccacctggtgtgcgctgttgctgatggtgctggcgaatctttggtatatgccctgggagttggttttctccctgcgttagcgcacaatacgccactttctttttcccggatttttacgttatgtctcaccgcgacacgctattttctgcccctatcgccagactgggcgactggacctttgatgaacgggtagctgaagtcttcccggatatgatccagcgttccgttcccggctattccaatattatttccatgattggtatgttagccgagcgcttcgttcaacctggtacgcaggtttacgatctgggttgttctctgggcgcggcgacgctctcggtgcgtcgcaacattcatcatgataattgcaaaattattgccatcgacaactccccggcgatgattgaacgctgccgtcgtcatattgacgcctataaagcccctacgccagtagacgttattgaaggtgatattcgcgatatcgccattgaaaacgcatcgatggtggtgctgaattttaccctgcaattcctggaaccttccgagcgccaggcgttactggataaaatttatcaagggctgaacccgggcggtgcgctggtgctttcggaaaaattcagtttcgaagatgccaaagttggtgaactgctgttcaacatgcaccacgactttaaacgtgccaacggttacagcgaactggagatcagccagaaacgcagcatgctggaaaacgtgatgctgaccgattccgtggaaacccataaagcacgcctgcataaagccggttttgagcatagcgagctgtggttccagtgctttaactttggttcactggtggcattaaaagcagaggacgctgcatgatcgactttggtaacttttattctctgattgccaaaaatcatctttcacactggctcgaaacgctgcccgcgcagattgctaactggcagcgcgagcagcagcacgggctgtttaagcagtggtccaacgcggtggaatttctgcctgaaattaaaccgtatcgtctggatttattgcatagcgtaaccgccgaaagcgaagagccactgagcgccgggcaaattaagcgcattgaaacgctgatgcgcaacctgatgccgtggcgcaaagggccgttctcactgtatggcgtcaacatcgataccgaatggcgttccgactggaaatgggatcgcgttatgccccatctttctgatttaaccgggcgcaccattcttgatgtcggctgtggcagcggttatcacatgtggcgcatgattggcgcaggggcgcatctggcggtgggtatcgatcccacgcagctattcctctgccagtttgaagcagtgcgtaaactgctgggtaacgatcagcgcgcacatttgttaccgttaggtattgaacaacttccggcactgaaagcctttgataccgtcttttcgatgggcgtgctttatcatcgtcgttcaccgctggagcatctctggcagttaaaagaccaactggtgaatgaaggcgaactggtgctggaaacgctggttattgatggcgacgaaaacacggtgctggtgccgggcgatcgttacgctcaaatgcgtaatgtctatttcattccttccgcgctggcgctgaaaaactggctgaagaagtgtggttttgttgatattcgcattgcagatgtgagcgttaccaccacagaagagcagcgacgcaccgaatggatggtcaccgagtctctggccgattttctcgacccgcatgatccgggtaaaacggtggaaggttatcctgcgcctaaacgcgcggtgctgattgcgcgcaagccgtaaaggtctggtaatactgccggatgcggcgtgaacgccttatccggcctacaaagtcttgctaattcaatatattgcaggggctatgtaggcctgataagcatagcgcatcaggca

SEQ ID NO: 1286 - DNA, 972 bp, Escherichia coli
ttatttgatgggataaagatctttgcgcttatacggttggatttcgcccggtttgcgagttttcagcaattttaatatccaggtgtattgttctggtcgcggaccaacaaaaatctcgacttcttcattcatccgccgcgcaatcgtatgatcatccgcctctaacagatcatccatcggtgggcgcacctgaatcgtcagacgatgcgtcttgccatcataaatcggaaatagcggtacaacgcgcgcacggcacactttcatcaaacgaccaatcgcgggcaacgtcgctttataggtggcaaagaaatcaacaaattcgctgtgttctgggccatgatcctgatcgggtaaataatatccccagtaaccctgacgtaccgactggatgaatggtttaataccatcatttctcgcatgcagacgaccaccaaagcgacggcgcaccgtgttccagacataatcaaaaaccgggttgccctgattatggaacatcgctgccattttctgcccttgcgaggccatcagcatggcaggaatatcgacggcccaaccgtgcggcaccagaaaaatcactttctcgttattacgtcgtatctcttcgatgatctccagcccttgccagtcaacgcgcggctgaattttctccggcccgcgtattgccaactcagccatcattaccatcgcttgcggcgcggtggcaaacatctcatctacaatcgcttcgcgttcagcttcactacgttctggaaagcagagcgacagattgattaacgcacgacggcgtgagctttttcccagtcgtccggcaaaacgtcccagccgtgccagaatgggatcacggaactttggcggcgttaaagcgatacccgccatcgctgctacgcccagccatgctccccagtagcgcgggtggcgaaaggatttatcaaactcaggaatgtattcgctattattttttttcgtttccat

SEQ ID NO: 1287 - DNA, 1323 bp, Escherichia coli
ttaatcaaaccgtagctgcggcacaatctctttggcctgtgccaggaattcgcgacgatcggagccggtcagcccttcggtacgcggcagttttgccgtcagcgggtttacggcctgctggtttatccatacttcatagtgcagatgcggcccggttgaacgtccggtattaccggaaagcgcgatacggtcgccacgtttcaccttctgtcccggtttcaccaggatcttgcgcaagtgcatataacgcgtggtgtagctgcgaccatgacgaatagccacataataacctgctgcgccactacgtttggcaaccaccacttcaccgtcacccactgaaagcactggcgtaccttgtggcatggcaaaatcaacacctctgtgtggcgcaacgcgaccggtcaccggattagtacgacgcgggttaaagttagatgagatacggaactgtttcgccgtcgggaatcgcaagaatcctttcgccagaccagtaccgttacgatcgtagaatttgccatcttcagcgcggattgcgtaataatctttaccttctgaacgcaaacgtacgcccagcagctggctttgctcacgtttaccatcaagcatttctcgtgacattaacaccgcaaattcatcgccttttttcagtttgcggaaatccatttgccactgcatggctttaatcactgcgctcacttcggcgctggttaaaccggcgtttctggcgctggcaacaaagcttcccccgacggtacctttcagcagattgttgacccactctccttgctgcatttcgctggtcattttaaaaccgttagcggcagtacggtcataggttcgggtttcacgacgagacacttcccaggtgaggcgctgcagttcgccgtccgcggttaatgtccaggagagttgttgaccgattttcaggttacgcaattctttgtcggcagcagccagttgggtgatatcacccatatcaataccatactgattgagaatgctgcttagcgtatcgccagtggaaacaacatattcatgcacgcccgcttcaccggcgattttgtcatccagttcgtcctggggaatggcttcatcttcttgtgcagcttgatcaatcggctcactggcttcaggtaagagcgaacgaatttcgttctgttccagctcaatggttttgacaattggcgtggcatcgcggtgataaacatagggccgccagacagcgacggccagagtaagaacggtgagcgaccccaacataacgcggtgtggtcgcggtaaattattaaacgccagggcgacagagcgggctatctgttgcac

SEQ ID NO: 1288 - DNA, 933 bp, Escherichia coli
ttaatctcctttcaggcagctcgcatactggttggctaattgattcaggaattctgaatagcttgttttacccagtttgatattcgtccccaggggatccaacgttcccatacgaacggatgtccctcgtgcgacgctctcaacgaccgctggcctgaactgtggctcagcaaaaacgcaggttgctttttgctcaaccaactgtgttcttatttcatgtaaacgctgcgcgccaggttgaatctcagggttaacggtaaaatgaccaagcggtgtcagtccgaactgtttttcgaaatagccgtaagcatcgtgaaaaacgaaataacctttccccttgagcggcgcgagctcgttaccaacctgcttttcggttgaggctaattgtgcctcaaaatccttcaggttggcgtcaagtttggctcgactttgcggcataagttccactaattttccatggattgcaaccgctgtagcccgcgctatctctggggaaagccaaagatgcatgttgaaatcgccgtgatggtgatcttcgtcacttttttccgcgtggtcgtgatcatcatcatcgccgtgaatacttttcatcagcagcggtttcacattctctagctgcgcaatcgttacctgtttcgcttcaggtaatttacttaccggtttttgcatgaacgcttccatctccgggccaacccaaacgactaagtccgcgttctgtaagcgttttacatctgatggacgcagtgaataatcatgttctgaagccccgtcaggtagtaaaacctccgtttctgttaccccatcagcaatggcagaagcgatgaacccaacgggtttaagcgaagcgacaacggcagcatctgcggcctgtgttgcaccgccccagagagcggcggataatgctgcgaaaagaagcgtttttttatgtaacat

SEQ ID NO: 1289 - DNA, 756 bp, Escherichia coli
atgacaagtctggtttccctggaaaatgtctcggtttcttttggccaacgccgcgtcctctctgatgtgtcgctggaacttaaacctggaaaaattttgactttacttgggccaaacggcgcaggtaagtcgacactggtacgggtagtgctcgggctggtaacacccgatgaaggggttatcaagcgcaacggaaaactgcgcatcggctatgtaccgcagaagctgtatctcgacaccacgttgccactgaccgtaaaccgttttttacgcttacgccctggcacacataaagaagatattttgcctgcactgaaacgtgtccaggccgggcatctgattaacgcaccgatgcaaaagctctcgggtggcgaaacgcagcgtgtactgttagcgcgagcattgttaaatcgaccgcaattattagtgctggatgaacccactcagggcgtggatgtgaatggtcaggtggcgttatatgaccttattgaccaactgcgtcgcgaactggattgtggcgttttaatggtatctcacgatctgcatctggtaatggcaaaaaccgatgaagtgctttgcctgaatcaccacatttgttgttccggcacaccggaagttgtttccctgcatccggagtttatttctatgtttggtcctcgtggtgctgaacaactgggtatctatcgccatcatcataatcatcgtcacgatttacagggacgaattgttttgcgtcggggaaatgatcgctcatga

SEQ ID NO: 1290 - DNA, 786 bp, Escherichia coli
atgattgaattattatttcccggttggttagccgggatcatgctcgcctgtgccgcgggtccgctgggttcgtttgtagtctggcgtcgtatgtcttatttcggtgatacgctggctcatgcctcattacttggcgtcgcgtttggtttgttgctggacgtgaatccattctatgcggtgattgccgttacgctgctgctggcgggcggtctggtatggctggagaagcgtccacagctggcgatcgacacgttattagggattatggcgcacagtgccctgtcgctgggcctggtggtcgttagtctgatgtctaatattcgtgttgatttgatggcttacctgttcggtgatttactggcagtgacgccagaagatctcatctctattgcgattggcgtggtcatcgtggtggctattttgttctggcaatggcgcaatttgctgtcgatgacgattagcccggatctggcgtttgttgatggtgtgaaattacagcgcgtgaaattgttgttgatgctggtgacggcattgacgattggtgtagcgatgaaattcgtcggcgcgttgattattacttcactgctgattattcctgctgctactgcacgtcgctttgcccgcacgccggaacagatggctggtgtcgctgttttggtggggatggtggcagtgactggcggtttaaccttttccgcattttacgatacacctgcaggcccgtcggtggtgctatgcgcggcactgttatttattatcagtatgatgaaaaagcaggccagctaa

SEQ ID NO: 1291 - DNA, 1011 bp, Escherichia coli
ttacggcatttctggcggcgtgatgccgaagtggttccacgcccgcactgtcgccatacgcccgcgcggtgtacgctgcaaaaagccttgctgaatcaaataaggttccagtacatcctcaatggtttcacgttcttcgccaatggctgccgccaggttatccagacctaccggcccaccaaagaacttatcgattaccgccagcaacaatttgcggtccatataatcgaaaccttcagcatcgacattcaacatatccagcgcctgagcagcgatatctgccgagatggtgccatcgtgcttcacttcagcgaaatcacgcactcgacgcagcagacggttggcaatacgtggcgtaccgcgcgcacgacgagcaacttccagcgcgccgtcatcactcatctcaagccccataaagcgtgcgctgcgactgacgatatattgcagatccggcacctgataaaactccagacgttgcacaataccaaaacgatcgcgcaacggtgatgtcagcgaacctgcgcgcgtggttgcaccaatcagggtaaacggcggcaaatcaattttaatggagcgtgccgccggaccttcaccaatcatgatatccagttggtaatcttccattgccggatacaacacctcttccaccactggtgaaagacggtggatctcatcaataaacagtacatcgtgtggttcaaggttagtgagcattgctgccagatcgcccgccttttccagcaccggaccagaagtcgtgcgtaaattaacgcccatttcattggcgacaatattggcaagcgtagttttacccaaccccggaggaccaaaaatcaatagatgatcgagggcatcgccgcgcagtttcgctgctttgatgaaaatctccatctgcgaacgaacctgcggctgaccaacatactcttccagtaatttagggcgaatggcgcgatctgccacatcttccggcaaagtggtaccggcagaaatcagacggtctgcttcaatcat

SEQ ID NO: 1292 - DNA, 612 bp, Escherichia coli
tcataacgcggcgcgtagggcttcgcgaattaatgtttcactgctggcgtcagggcgagcgattttgctcaccatgcggcttgcttcttgtggtttatagcccagtgccaccagcgcagcaaccgcttcctgttcagcatcgtcggtcgccgggctggcaggagacgtgagtaccaggtcggcggctggcgtaaagagatcgccatgcaaacctttaaatcggtctttcatttcgacaatcaagcgttcggcggtttttttgccaatacccggcagtttcaccagtgcccccacttcttcacgctcaacggcattaacgaactgctgcgctgacattccggagaggatcgccagcgccaacttcgggccgacgccgttggttttgatcaactctttgaacaacgtgcgctcttgtttattgttaaaaccgtacagcagttgcgcgtcttcacgcaccacaaagtgggtgaaaacgatcgcttcctgacccgcttcagggagttcataaaaacaggtcatcggcatatgcacttcatagcctacgccgcccacttcaattaacaccagcgggggttgtttttcaatgatgatgcctctgagtctgcctatcac

SEQ ID NO: 1293 - DNA, 603 bp, Escherichia coli
gtgaatattaattatcctgctgaatatgaaattggtgatatcgtctttacatgtataagtgctgccttatttggtcaaatatcagctgcatcaaattgctggagtaatcacgtcgggatcattatcggtcataacggtgaagactttctggttgcagaaagccgtgttcccctctcaaccatcactacgctatcccgttttattaaacgctctgctaatcaacgctatgctataaagcgattagacgccggactaacagaacaacaaaatcaacgaattgttgaacaggttccttcccggctacgcaaaatttaccacaccggttttaaatacgaatcttcgcgccagttctgttcaaaatttgtttttgatatttataaagaggcgctatgtattccggtgggtgaaatagagacgtttggagaattgttaaatagcaatccaaatgcaaaactcactttctggaaattctggttcttaggttctattccgtgggagcgtaaaaccgtcacgccagccagtttgtggcatcatccgggtttggtgttgattcacgcggtgggagttgaaacgcctcagcctgaactgaccgaggcggtataa

SEQ ID NO: 1294 - DNA, 522 bp, Escherichia coli
ttaacgcagtcgccctctcgccaggttcagtcgcgattcgctcatttgcatcgcattctgactaacgtggcagtgggtgatggcaatcgccagcgcatcggcggcatccgcctgtggattagcgggcagtttcagcaaggtgcggaccatatgctgcacctggcttttttcggcactaccaatacctaccactgtttgctttacctgacgtgccgcatattcaaataccggcaattcctgattcaccgccgccacaatcgccacgccgcgcgcctgccccagtttcagggctgagtcagcgttcttcgccataaagacctgttcaatggcgaaataatcaggctggaattgggtgatgatttccgtcacgcccgcatagatgagcttcagacgagacggtaaatcatccactttggtgcgtatgcatccgctacccaggtaggacagttgcctgcctacctggcggatgacgccatagccggtcacgcgcgaacccgggtcaatgccgagaataatagccat

SEQ ID NO: 1295 - DNA, 741 bp, Escherichia coli
tcagagagtcgctgcaacctcatcagagatttcaccgttatggtaaacttcctgcacgtcgtcgcaatcttccagcatatcgatcagacgcatcagtttcggtgcggtttctgcatccatatcagctttggtggacgggatcatggaaacttccgcgctgtctgctttcagacctgccgcttccagagcgtcgcgtactttgcccatttcttcccatgcagtgtagacatcaatcgcgccgtcatcataggtcacaacgtcttcagcaccggcttccagggctgcttccatgatggtgtcttcatcgcctttctcgaaggagatcacgccttttttgctgaacaaataagctacggaaccatcagtaccgaggttaccgccacatttgctgaatgcatgacgcacttcagcaacggtacggttgcggttgtcagacagacattcaatcatgattgccgtgccgccaggaccgtaaccttcgtagatgatggtttccatgtttgcatcatcatcaccgcccacacctcgtgcaattgcgcggttcagagtgtcacgggtcatgttgttagacagtgctttatcaattgctgcacgcaaacgcgggttagcgtccggatcaccaccgcccagcttagccgcggttaccagctcacgaatgattttagtgaagattttaccgcgcttagcatcctgcgcagctttacgatgtctggtgttggcccatttactatgacctgccat

SEQ ID NO: 1296 - DNA, 444 bp, Escherichia coli
tcaggcagcgttaattacaaactgttcaatcgcctgccggttgctccaggacttagtgagcgccgccgcagcagacgcatcaagccacttgtaagccagatgttcagtgaaaacgatctggcgctcgtgcggaagcgcaagacagaaccatgattccgtattacgcgtcacgcccggcgcatagcgatgacgtaaatgtgaaaaaatttcaaactctaccgtgcgctgacagtcaattaaggtcagttgttcagcgacaacatcaatggtgacctcttcctttacttcgcgcatggcagcttgcggcgcggtttcaccctcttccacgctgccggttaccgactgccagaaatcgggatcgtcacgccgctgcaacatcagcacccgtttcgtatcttgtgcgtagatgaccactaagatcgaaacgggacgcttataagccat

SEQ ID NO: 1297 - DNA, 1773 bp, Escherichia coli
tcagttattctcagccttcttcacaacctgaatgctcagctcagccagtgcagtcgggttagcaaagctcggcgcttcagtcatcaaacacgctgccgccgtggttttcgggaaggcgataacgtcacggatattgtcggtgccggtcagcagcatcgtcagacggtcaagaccgaatgccaaacctgcgtgcggcggagtaccgtatttcagggcgtcgagcaggaagccgaatttctcgcgctgttcctcttcgttgatacccagaataccaaacaccgtctgctgcatatcaccattatggatacgcacagaaccaccgcccacttcgtaaccattgatgaccatatcgtaagcgttagccaccgcattttccggtgcagctttcagttctgctgccgtcatgtctttcggtgaggtgaacggatggtgcattgctgtcaggccgccttcaccgtcgtcttcaaacatcgggaagtcgataacccacagcggtgcccatttgctttcgtcggtcagaccaaggtctttacccactttcaggcgcagtgcgcccatcgcgtcggcaacaattttcttgttgtcggcaccgaagaaaatcatatcgccatcttgcgcgccagtacgctccaggatggcttcgatgatttctgcattaaggaacttcgctaccgggctattgataccttccagacctttcgcgcgttcgttaactttgatgtaagccagacctttcgcgccgtagattttaacgaagttaccgtattcgtcgatctgcttacgggtcaacgatgcgccgcccggaacacgcagagcggcaacacggcctttcggatcgttcgccggacctgcaaatactgcaaactcaacagatttcagcagatcggcaacgtcggtcagttccatcgggttacgcagatccggtttatcagaaccataacggcgttctgcttctgcaaaggtcattaccgggaaatcgcccagatccacgcccttcacttccagccacagatgacgcaccagcgcttccatcacttcacgcacttgcggcgcggtcatgaaagaagtttccacatcgatctgagtaaattcaggctgacggtcagcacgcaggtcttcgtcacggaagcatttaacgatctgatagtagcggtcaaagccggacatcatcagtagctgtttgaacaactgcggggattgcggcagcgcgtagaatttacctttgtgcacacgagaaggcaccaggtagtcacgcgcgccttcaggcgtggctttggtcagcatcggagtttcgatgtcgaggaagccgtggtcatccataaaacggcgcaccaggctggtgattttagcgcgggttttcaggcgctgagccatttccgggcgacgcaggtcgaggtagcggtatttcagacgcgcttcttcggtgttgacgtggttagagtcaagcggcagaacatctgcacggttgatgatagtcagcgaggacgccagtacttcgatttcgccagtcgccatatcgcggttaatatttttttcgtcacgcgcacgtacggtgcccgtgacctgaatgcagaactcattacgcagttcagaggccagctttaacgcgtccgcacgatccggatcgaaaaatacctgcacgataccttcgcggtcgcgcatatcgatgaagatcaggctaccaagatcacgacgacggttgacccaaccacacagagtcacctgctgccccacgtgggacaaacggagctgtccacaatattctgtacgcat

SEQ ID NO: 1298 - DNA, 567 bp, Escherichia coli
atgcttgaacttaatgctaaaaccaccgcgctggtggtgattgatttacaagaaggcatcttgccttttgccggaggtccacatactgccgatgaggtggttaatcgcgccgggaagctggcggcgaaatttcgcgccagcggtcagcccgtgtttctggtgcgcgttggctggtctgccgattacgccgaagcattaaaacagccggttgatgccccctcccccgcaaaagtgttgcccgaaaactggtggcaacatcctgctgcattaggtgcaaccgacagcgatatcgaaatcatcaaacgtcaatggggtgcgttttacggtacggatctggagttgcaattacgccgccggggtatcgatacaatagtgttatgtgggatctcgaccaatatcggtgttgaatccaccgcccgcaatgcctgggaactcggttttaatctggtgattgccgaagatgcctgtagcgccgctagcgccgagcagcacaataacagcattaatcatatctacccgcgcatcgcccgtgtgcgtagcgttgaagagatcctcaacgcgttatga

SEQ ID NO: 1299 - DNA, 390 bp, Escherichia coli
tcacatcaccgggcagtcatcaaactccgcattcctggcatcattaatgatgtacgtgatcactccaaatatagcgggtgcagaactgtaaccatcatcatctgctggcagcgcttcccttctcccgttatccagattaaccaggtgcggctgaggatgagtccgatatcgcttgatcctgaattccccgtcgattgcacatatcagcagtgaaccatcgcaggcagtaagtgacgcatccacaacaagcaacgctccctggattatcccttccctgaaatgtgaacgcgatgcccgcatgaaataagtcgctgcgggctgactgattagctgctgatcgagggagattcgtgtttcaacataatctgccgcaggtgaaggaaatcccat

SEQ ID NO: 1300 - DNA, 243 bp, Escherichia coli
atgttcgtggaactcgtttatgacaaaaggaattttgatggtctgcccggtgcaaaagatatcattctgggcgagttaactaagagagttcaccggatcttccccgatgctgatgttcgggttaaaccgatgatgacactgccggcgatcaacactgacgccagcaagcatgagaaggaacagataagccgtactgttcaggaaatgtttgaagaggctgaattctggttagtgagtgagtaa

SEQ ID NO: 1301 - DNA, 381 bp, Escherichia coli
atgctgtggaggatattcattttcgtaaacgttggtttgggagaagcggcaaaacggaatgtgggaacaggggaaaatcagataccagatatgtctgcatttccatctggcaataactggtttcagttaccaagtggacatatcgttcagatattttccatgaacgttcttggtgcagatgctaatggcacgtcagctaattaccccattgcttttccaacaacgatgattgctgtcagtgctctatggtctgatgggactgtagcaaatgcaccgacatacaagatgatggggaacacgactaacagaacaactttgacgataaaagtatcagccagctcaggtacttacgggacaatgattattgcggtgggacgataa

SEQ ID NO: 1302 - DNA, 444 bp, Escherichia coli
atgaataaatacagttactctccttcagaaaatgccttttatgctgttgcgttaaaaaatacctatgaattgagtggcacatggccagctgatgcattagatattcctgatgacatttctgtaaaatatatggcggaaccgccacaagggaaaatccgagttgcaggggaaaatggttttcccacatgggctgaaatacctccaccatcacatgaggaacttattgaacaggccgaatcagagaggcaattattgattaaccaggccaacgaatacatgaacagtaaacaatggcccggtaaagccgctattggtcgtctgaaaggcgaggaactggcacaatataattcgtggctggattatctggacgcactggaactggtcgatacttccggtacgcccgatattgaatggcctacgcctccggcagttcaggccagatga

SEQ ID NO: 1303 - DNA, 594 bp, Escherichia coli
ctacgcctccggcagttcaggccagatgacatccggcgcggtgctggtatctgttgcagtcaccgcgtcaatgtaatccagcacggcgttaagtcgggttgtttctgcctgagtcagtttccgtccggcctgtaatttcagctgaatcagactaatggaagccattgctgcatcaatcagtgattggcgctgtgcttctgccgcttctactgaggcaccgtgttgtgcctcagtatctgtcacccatttctcaccatcccatttatcatatggcgttaacggtgaaagcgtgacataaccgtttttgatggcaccgatataatccactgtaacagctgcgccattttcgattgagtaaacagtctcattgcgatggtcttcctcatggctccatcccttacctgtaaatactgccactcttcccggaatgttttcgtccgggtcaataccagtggaacaggcgggcatacttacgccagtattaatatattcatcagaccagcccgtatattcagacgttactgcatcataataaaaacaacgcatatcacccggcactgcagccagcccattttcatcaaaaacaggtttcat

SEQ ID NO: 1304 - DNA, 933 bp, Escherichia coli
ttatttagccctcaccagaaagttaaatgcaatatttcgcggtctgacagcaacaaaattcacaccatcacccacagagttactgttgaaattaaatcgtgaaaatcctggctgatttccggcgatgccatcatgaaagttaattgcgtgtccagcacctccgcctatattcccggcaaactgagaaaagtttgtagcttcctgccagcttaataattcgcgaccaccatctgcacctcgcccgtcatcccagacacgaatgaaatcaccgcgggcttcaggtaataccagcgaaggaaacactttcgccagcacaggataatcagtggcagagaatttcgcgccgttgaacttcaaaaacaccatactggaccagctgtcgattacagtatttggcattgcagcggacggccagaagaacggaacgccaatagctggagaaccttctcccaaaccaaggtttgtgcgagcgtctgcggcattcgttgcgccggttccgccgtctgcgacagtaaccgcaccgttgctccctttctgcgcaagtttaccgatgcctgggatggttacggcggtgccgttgatggtaactgtgatgctttggtttgctgaggtggtggcgaacgtctcccacgcgccaatattctcgtcgtactctttgatgagctgtgacatggcctgcgccaggccgtcgactgagatattgtccgacacaaggattccatacttctggccgctcagcgccggggaaactgctggcgtaaccgtcattgacgtggcgctgttcacggatgaaatctgaaacagctgcaccgggttagacatcacgataatcgtctggccagcgcggacctggctggcgggagctgtccagtttgtgccggagccggttgcggtatttccgttaatagagatagttccggtgctataaatcat

SEQ ID NO: 1305 - DNA, 3927 bp, Escherichia coli
ttaacctgtgaatgaaccagatccgtgtgatactatgatagtaggcgaagaaattgacgcacccctgttattttgagcggacactttaatacgcactgttacgtttggacctgttacaaccgcagaatgcatgataagtctctccatgtcttgcacggatgaaccactctcattgccgttaatgtcgattgttcctgcaccattacctttaacgtttgctataacacagacgtgtcttgcgtgcccagaactggatgaatcattataagtcattaccttttctaaatatccgtcactagaccgactcacattcgtccctgtgtgcatatttgcaatgtccccgataaaactttgggcttccacagtccctttgaatttaccgcttgttgcttggatctcaccagtaaagctaccgccactagcatatactacacctctgacggtcacattgttgaattcagcatctccagctttattcaacttccaaccagcagaaccagctgcatagttgttggactggatatagttaccgatttttgcgttctcaatggtgccgtcctggatgaagctggcccggatgaatgtctgcccgttctggatcacgaacggcaaagctacgctatttccggctgccgtggtgacggcgaagcggtcagccaggaagataacctgcgactgcatgccggatggcgtattctccacgccgatacccatccccgcggcgtaatactgcccgttgctggagacaccaaccttgatgttgtacatcgcgctgagttcgccattaacgttggctatagcctgagcgttagtggtgatggcggaggtatgcccgttcacggtcgccgtgatgccgtttatctgcgtggcggtggcctgctgatagtcggagagcgtctgattcaggctgttgatggatgccttgttgccgttgacgtccgtctgcaggctcagcaatgaacgtgctgtggcttccttctcactgacgatcacctcgtcgagacggtccagattcgcgctgttgccggcgaccgatgcagaaagggttttacgcgtggccacctgagcgaggttggcctggattatcgcaattgcagagttcttcaccccgcccgtcatgccgtccatagaaacgctgatgttgtcgattcgctggcccagggcggtatcagccgtcgcaacggtctgctcaagctgactgagtgaagacgaaacattcccgaccgtgctggaaagctcattaacgctggtctgaaccttcccgacgtcctgggcatttttggcgatatctttcgcttgctgctccagttcgtcgttggcctgtttgatatcgttagccatgccagcaattttttcgttgctgtccaccgcgttctcgatcaggtctttgaacgtttccgactctttcatatcctccagaatgtcattagttatttcgctgacatctatcgaggacgtgcccatgatccagtcggtccagtccccggcgttaccgatacggtcaatcaggcgcgcgcggtaccactggcgaacgccggcaggcatggggccatgctgataatctgcagccgggtacggcaccaggaccagcagttcaggattggcgtagtcggcagttgtggcgcgctgaatctctgtataggccgtgtcgcctgagccatccggaaatttccaggtcaggtcgatatgccagaccacatcttcggtcgccaggaagttgagcggagtacccggttttcccgttttaccggagagataagttgtttcaccgtatccccatggtgacgacgtatcctgcgcattcagcgcccgtacgcgcacgtcatagctgcccgaataaatgccctgaaccgagaaaccctgcgcgctggtaaccggaacgtttatccagtccccgttgtccttacgccactgggcaacataccggattgcgccctctaccttatcccatgacacgtccaggcttgctacagtcagcccctgagacacatgatcgctctcagtcaccacgatattcttcggagcagacaggacgcttatcggcgtgacggtgatcgggggagactcgacccgaacgccgtcatcgatgtaacgatatttgtttggatcgtgctgaacggccgtaatagtgaaaccgcctgtactgtcgtcgttagccgcgattgaggtgaccctgaagtactgtattgcgaggttatcactgtctatcgcccaaacagcgcccgccacaggaacctgactgaatgccgtagccaccgtcaccgtttttttatcggcgctcaccgcgctgattgtccgcgtctgggcttttccgtcgggaaggttaaccaccagccggtctttcgccgcgtagtctatttctcgatcgagggtaatttggcggccgttggccgcgcttatacggcccccgttctccttaccagagcggaaaggatcggcgacaccgataatttcagcgggcaaagggatataaccgtccagccccacgccaaacgatacggtcccgtctttggcattggagagcaatacccagcgaccgcgtcggtgcgcttcactttgcgaggtgcagccgattgcggtcagggacgtctgccggacgtcgtaacgttctacaagcgccgaatcgtaaaccccctcaacggtatcgctgtaatggttctgcggatcggaccaggacaccaggcaggagctgtagcgattcttgtatgagccgcccgcataagtaaacagcccatcgataacgtttgagacgttataaacccagtcaacatcgtcctgcgggacgtctgcctggacataaatctgatcgtttccccagaacgttattccacgaaataccgcggcgagatcgttaagtacctgccaggcgtcctcctggctctgaatgaaaacgttgcaggtgaaacgcggttcggtgccaccggccccgtcggaaaccatttcgtcacagtactgggcgattgaatacagcgcccacttatccaccatggacgcatccacgcgcgtgcccatgccgtaaatttcatccagaaccagatcgtaaaagatccaggcagggttattggaccatgccattttgaacccgccggaccatgaaccagaataggttcgggttttcggatcgtaattatccggaaccttaatcagcttgccttttatcttacaggtcactttcggcgcgctgccgttgaattggctgctgtccacttcgacatacaggagcgctgttaaaggataacgaagcttgctgtcgatgacttccgcatacgaaaacaccttgaaggcgttaaccagtttcgaatttgatccgctggcatcagccgtaatacgcctgaccctgacagaccagccggacgtggattttggcagatcgatacggtggtcacgctgatattccgtcgtggtctttccgtcaaacttgccgtttacaaccgttttccaggcgccgccgtccgttgataaatcgatcgcatactcggtgaccgtgcccaccatatcgccattatctttatagagatactggaccggaaggctgagcttgatacggatggcatccagggaaaggtttgtaaactggcgcgtccagggcgcggtggtggtgacagttgtgcccacggccagctcgttgtcgacctggggcatcccggcaatataggtctggtcctgtgtgcccttgcggaactcccatttcacgccgctgaagttgtattccccgctgtcgtttgccagcggcgtatcgttgagaaaaatgttctgagcggtcaggtcgccctgtatttccccctcagaaacggcaatgagcatttttaattttgcgaccgacagcagatcgtcaggctgctcaaccggagtatgtgaactgccacctccccctttggcaccctgcaggatggtttcttgtttaagaagctgcattttttcacccat

SEQ ID NO: 1306 - DNA, 618 bp, Escherichia coli
ctactgctgatcgctcgagtacataccggcgctgactatcgctccccctgcctcagtcagaccgtaggccagggggacaggatgccccatagcgacggtattgaccggcgccccgaaggcgtagttaggcgtgttgtccgtgctggaggatttacccgcgccgaaggatggctggggcgtgagcatctggacaacgccccccagcatcatcgacactccgacccctgtcagaattgacgtggcgctgatagctgttgcactcatcgccgcgccccaggctgccatgctcgcaccagcggtaaagaatgcagcgaccagcgcaacagccccgacaactatctgcaggacgcccgaacttttggccccctcataaacgggcacgatccggtacacgcttccaccgcgggtcatatcaaactcttccagcccgatattgttgccaccgttaaaaaaggcgaaacggatccccttcatatgagcttcagacatatattttttgaatccgggaacctgtgaacacatggccctgagcatctcgcgcaggtcggcaacatcaaactgaacgcgtttaccgaatttttttgccattttaccttcgagaataagcgtcttaaccat

SEQ ID NO: 1307 - DNA, 720 bp, Escherichia coli
ttaaccatgcattctgtccttatgcctgaccacccggaccgttctgtcgcgataatattttccataaggcgttcgcgaagaaaggtgcccgaaaagatgatggagaatgatgttatcacccacatataccgcggcgtgattagtcaccgatgcctgcacactcatcatgatgatatctccgggctgcattgcaccggcggcaatctcaacgaatccctcacgctcccagttgtcgtcgtagagacgctccttgccgctctcccaccattcgtaaggtactgaataattgccgagaacaatgccgtattcgcgcagataaaattcacggataagcgaccagcagtcggcgtaacccagcacccactgccgcccggcataatcccggtcttcacgcggggaaatcgtacaaaaatccccgtccggccaggacatgatcccccactcaatccccgaccagtcgcactggatccggtccagctctgagggcaccagccgaaccacatccggatgggaatgaatgagcatgatgatctcaccgcgcgcgcgggcagcgagctggtcttccggggagagcgtgaatgtctcctcgggtttatcggcaatgttgcggcagggaataaagatttgttgctggcctgactgaacaatcaggccgcaggcttctttggggtattcagcagcgacgtgctgacggatagcatccagcaatttttcacgcat

SEQ ID NO: 1308 - DNA, 738 bp, Escherichia coli
ttatttcccctgcaggtttgcagccggaaaaccgccgaacggcagcggcgcatccgggccgtgacgatcctgacaatcctgccggcggccgccacaaacatctttcgacgggtcatcggtcggtgtaccgtctttggtaaagtatttcgtgccgttgtaatcgcatccggtcccgcttcggtaccagccccgcatacaccaggtgcagacaggcgtaatctgccgtgtcggcagctgcaggctctgaatatcgaaaggagaacacagctcgaaatcaacctgtacccgcgtctctgcggttttagcattgacgtaaaagagctgtaagcgctcatcggccgggctggcacccggattaccgtttttccagttggcggcatcgagatacttcgaaagcgtggtatggattttgaccttagccctgaccatatcgtcatattcaagacacagcgcggtgacatagtttccgacgttcccgacggacagcgtgggcgttggctgggaacctgtactcgataactccatccccttaagttcgtagggatggggatcgtactggtttccctgccagataatggcgggcagattttctgcggcgaaggctgcccacccctcttcctgaatattgtgcgcatgaaaacgcagcacctgatccataccgaattcagtgccgtcgatctcaatcagctgaataacgctgccgggctcaagctgttgtatgtctgccgtaaaactcat

SEQ ID NO: 1309 - DNA, 339 bp, Escherichia coli
tcagggcgcgaacgcctgttcaaaagtgaaggccacagtggcttttttcccggtagggaaagaaacgctgaacgaatcggccttcattctgaacagctttttttcaccccatggagtggtccaccagaacgatttagtaacgtgagacatcaggaaagcgcgcagcgcagccgcctcctgtctggtgcccgtccagtccaggttccacgtttcctgtttgtcgttgatccccatccccgctatctgtttgtagccatccccgaactgggcctgcagcgttcgggctgtttcagtgccctgcgctgtttttcgcgtgcgccaggtaaacgtgtccgtcac

SEQ ID NO: 1310 - DNA, 3138 bp, Escherichia coli
tcactgtgtcctcctcgaataaagcacgccgcccgcggacatttcttttttcagtcgctcggtgattgtctgctgaacaatcgcctgcagctgtttcgccgtccccgtggcgttcgcctgatttatgcttccgtcactcccctgctggctgatgctgactggggcataaacactgatcccgcccatgccagcaccggctgcgttcccgccgccgaccagaccacccgaggcatacccgcgcatcaggcgatagagattagccacgccgatgcggctggttgattctttggtgaagacgaattccccgcggtgaacgataccggctggctcgtacttgccgccgtgcccggtaaaaccgcccacgtcaaaaccctgtggccggtatgacgggaccgcgaatgactgaccggcagaggaggttttcgccccgccgctaacccagcccattgcactctggatggtgtaagccaccagcagctggttgataacggacacaatcattttaaggatcgagctggtgaattccctgaagctcgccttcccggttgtcgtcaggctggtaagctggcccgccaacccgctgaacgtagcctgagaaatctgctgaacggagctgaaaacgtttgtcgctgaatcctgatattcggcccaaccctgtttcgcaccggccagccagtttgcacgcagggcatcttcagcttcgaacgtcgccctttgctcttccagaaccttttgctgcgcctgagggttgtacgaatagctttcgctgagacgctgcagcgtagtttgtcgcccggcttcccgggtggataacccctcagactgagcctgcaggcccgccctggcggctttttgctgctgctcaaacttcacggcctgatcggccagctggttgagcttttgctggctggcaaccttatcgcccaggtcggccagctgccgcttgtactcgagcgtttcttctttgtgcgccagcagggatttttcctgcgccgtaagctgacgacgcccagcggcctcctgcagaacggtgaactgattttcagtttgccagagatcctgacgctgtttacttatgacgtcgttcacgctggtatgctgctcaagcgttttaagctgggcctgaagggtgagaagttcggcctgcgccttttcctcggctttgtccccggcgggcgttgagtagcttttgcctttcggtgtttttggatccttccactgcttttcaatcccggcgcgggccgcggcaatgtccttttcagtccacagcgtggcgacaccgtctttcgcatcctggcggtttttctcaataagctgactgagctttttctctgctgaagcccgcttttctgccgccgtcgcgccggactccaccagctggttaaactgctgctggctgcggattgcctgagcctgctggtccgttcgcattttttcccgcgcggctgccagcccttcctgggcgtattgctgatcggcaagatcgtaagcctgctttttcagctccacctgctggcgcgcgtttctcagcctttccgcatccgctttctgcagaacgttgttaccggcataatccgggtcgaccttaagattgctggacagcgcgcggtactctttctctgctgcctgccactcagcaaaagagtcctggcgcttcatcgcggtgtcaggattacgcccgacgcccagcatcgcatcccacgcaccggaggcggcattcttcacccagttccaggctttttcgagggatccgagattatcctcgaccgcaccggcgcgctgaatgaccgcgtcggaatatgcccgcatggccagctcggcagccttctgagaatcccccagcgcctgagcagaagctatctgttcatactgggtggctgtcagaaaatgaagggaatcgttgagcgtcgcgaccgcgttaaccggatcatccttcaggcgtttaaactgatttatggtttcgtcaacggcctgcccggtagcctgctgcagcctggcggcaacattgctgaccatgctgacgtcattaccgctgaacgcgccgctgccaacgacctgcgccagcacgcctgcagcggcatgctgagtgatgccattacctgccagcgagcgcgccagcgcctgcagctgccctgacgttttccccgcgtagttcccggtcaggatcagctgcctgttaaattcctcagactctttgctgccgtcgtaccaggccttacccaacccgaataccgccgcggcaatccctccgaccatgctggcgatcccaagaccgcgcagtgacagaagctggtctatccaccctgcccggttagccagcgtgatcccggagccgcgcagcgcgccgaagttaccgcgcatgacctcgccgatcagtattcccagttcctgccgggcggcggcactttgcagccccagaccgtgcgtggcgactttggcagcttcgagcttgcggatatagacttcagccgcatcgctggcaccgacctgcgccgccttcatgcgcagtagctcggtaccggagagcttttgctctgcaacctgttgcttcagctggctgaggaatcgcgtgcgcgctgcggccgatttttcctccacgatctgcagttctttttgacgggccgtggtgcgggaaataagggcgagataatcctgctgggttatgttgccctgtgccctcgctgcgcgaaagcgcgcctgcacgttcgcaagcgactgtgtttcaccattgagctggcgtacgccgtcgatctggcggaaaaatgatgccgcaagttcatcctgtcgacgggcaagcgcagcggcctgcccgtcattctcacgcatgcgctgattaagctcggtcacgcggcggtgagtttcatcaacggactttgaaacgttctgccagtctttggtaagcccttccgttgcggccgactggcgggatttcatatctgcggcagccgccgcgccagcgtcacccacggttttaaacgcagccgcctgccgctctgaagcgcgctgcattcgcgtctggactttttcagagtcctcagccatcccggttagctggccctttatgcgggcaacctgctcactaaacgtggcgctgtcgacgtcaaggttgatgaccagatcgctaatctgctgggccat

SEQ ID NO: 1311 - DNA, 273 bp, Escherichia coli
ctaatctgctgggccatatcggatacctcctgttatcccctcagctgcggccatcagcgcatcatcatccggctcgtcatcgctgatgacgataccggaaggagaaagcaggctgaaatgtgcgggggtaagttccgggtcgcggaagaaaagagtggagatggaataaagcagctctgagaaatgcgcatcgagctgagcgtcctgaaaataatgctcccggtagaactggtgccagtcgcccagctcagtggaagtcattccagccagcat

SEQ ID NO: 1312 - DNA, 432 bp, Escherichia coli
tcagctcgctggcaagggcttttccgccgcaacgggttctgcgctttcggcctccgctggggcatccggatcggcagctttgtcatcctcaaccggaacgagcatgccggagagcagctttatttccatttctgctttaccgatcgcctccggcggccagccgctaagcacctgctggtaaagcgtctccacatccgtgccagccggatcgttatgccacaaagacatcgcaatcaaacgcgcaccgcagcgaatatttgagccaatcagcctggccgtcatttcctgatcgctgatgccgtcgctgtcagcgctgacggccttttcctctgcggccataaacgtgatgtactcaatacgctgaagcgccgacagctcgaagatggtcagtgattctttttgccaggtgaacttctcttttttcagaaacat

SEQ ID NO: 1313 - DNA, 744 bp, Escherichia coli
ttacgctgcagttacggtaactttgcagaccgcaacgaaattaccgtcgctggtcataacaataacgtcagcggtgcctgccgccacgccggtgacggtgatcgcattaccgctaacggtgaccgttgcttttgccccgtctgaggttgccacacggaacgaggtatctgaggcactggctgggttaaccgtcacattgagcgttgtggttgcgccgacggccacgcttgccgtggctttatcgagcgtaacgcctgtcacggggatattcggggtcccgctttcttctgccagttccggcttgccggtattggtaattttcgctgtacgggttatgacctcttttgccggaatggctttacccaggctgctgcaccagccgcggaaaacgtcgacggtaccgttcgggtatttgattttgtaatagcgtactgagccatcaataaaccatgcgacaaggtctttttgcccttcttcgcccggcttccaggcgagggtgaacgaggtatcgccagcagattttgccccctgggccgtcgcgttccagtcggcatcctcgtcgtcgaggtaagtgtcgtcatacgattcggcggtcatttcgcccggcgtcagctctttaattttcgccaggcggttccagtcgatatccgagagtgggttagcgaaagcgttgcccgttccggtgtaaagccagagggtggtaccggcacctttcacaggggccagcgggtttggagtaggcat

SEQ ID NO: 1314 - DNA, 402 bp, Escherichia coli
ttaaattgaataggtgattaagtacgtgaaatcgactgaaccccaggtggccatttcatcatcccgctgatagtcataaccctgcggggtgaacgtctcgaccagttcggtcagacctgggatgaaggccattgccggatacactttctcttccatccaggaatcaagcgcgctgtcggggctggaggctttaagaaatacctcgatgtgaacaaccgcctgccacgaatcttcgtcaagcgaatcgccggtgtactccgcgtcagaaaggtatacagccacggcagggagatcctgctcttcaagaaaaacagggcgcccgtcaaaccaggtgaccgtgtcggtgatctcggctttcagtttggccagaatggctgcacgaattgcgctgtgtctgttcat

SEQ ID NO: 1315 - DNA, 573 bp, Escherichia coli
tcatcgcttcaggtggatcctcagttggtttttcagggctgcggaaagttctttgggcatatcgctttcaataaggcgctttgaaatagcggtgaaggccacggtgagcggtgtctcaagaggaactttgaccacatcaatcggataacgggcctgacctacgcgccgcatgacctgccagcgcccgttcgcaagctgttggataaaagcgttacgaaaggtatagggcccgattttaaggacgctgcccgctccgtttctggccccttttttacgcgagagcctgacgcgcgccgtgccgagctttatcgcaggaagattaccgcggttgatttttatcgacgcgaccgggcgatcgtgacgggccttgcgcagacgggaacgctggcggaccagacgaaccggaagcccctttttccggttatcatcaactgttgcttctttcgctacagctttgctcccctggcttatcgttcttctggccaccctgttaagtgcttttgcggttgcctcaggaacgattaaccggctgaggctgttcaggttctgaatagccctttccagtcctttcac

SEQ ID NO: 1316 - DNA, 243 bp, Escherichia coli
tcattcgagatggatgcggggttttccgttgaacatgtcatagcgggtaacgatcaggttcttaccgtcgtagtcgacgctgtcgtttcggcgtggctggtaaagctcagagaaaaccaccagcgaagtacctgttcccgacaatggccccatttcctcgagttgctcggcgggaacaacgtcatagctgctgccattgatgatcgctgtctttcccatcttttttatagtggccgcgtccat

SEQ ID NO: 1317 - DNA, 327 bp, Escherichia coli
ttaggcattgatcttaacttcaacaacggtggtgtttgcccctgcatcttcccaggcgatgcccgcggcaacggcgtccgtttcttcgatcgtgattttgccgtccttcagatacacctgcgccccggcagtaaccgcatctgcggatacttttggcaggaggaaaacaccctcagtaaaaccgtccccggtatcgccagccgggatatcggtaattgccaccgcgataagttttccaacaacaaccgggtcgccgctgtgaacatcggttgcaccactgtttaccagagggatcgttttcccgtcctgcgcatagttcttagccat

SEQ ID NO: 1318 - DNA, 1947 bp, Escherichia coli
ttactgaccagaggatttggtcatgccgcgatagtccagcggcgccacgccagcatcaatacgcactttcgtggcgataccatcagtggtgaagccttcctgctgatcgatgtatggcgtgtcgacgccgttgagataagcgacctcaatggtgtcggtgcccttcgcggcagccagataccaggctttcgcatcagcttcatccagacgtggttcggcaatgacttctgcaaagttctggatagggttaacgatcccggcattgatgtctgcacctttaacactggccgacttgatggtctgatttgccagagtttccagggcgacgggcaccagcatgtaggccggacggatattcagggttcgctccccctccttctgcagacgcatcagcttgcgcgattcgtccaggctggccacagaaattgcacccgagctcaggttcttgtgatcggcatggaacagcgcctttccgtctgagagtttcgggtttttggtcagaatggcgtaaaccagatcgccaatcgttgctttcgccgcgcgccccatcttcatcggtacgtcggtaagctggttcagatcgtcgttgatgatcgcctggcgagttactgagaagatttcaccatacgtggcaagcgcgatggtttcgcctttgtcactggtagtgatgtacttgtactcagccccttcgcgaacctgtcgcagagaagggaacccacccataccgacacgatgcgccgttttgaagtccgacagctggccttttttggtccactgctcgaaggtttcctgcgcctcgtcccagccctgaatcagcgctttgttcgcaacatcaagcagaatgttgccaaagtcagaggtgctgtgggtcagcgccaggccaaccatctgcatcgggttgtagctggccacgccgatacctttttctgtcagggccatacgcgcatactcgcgcagcgtcataccgttataaacgttatcccgctcctgaccttcgaacccggcacgcgccatcagtgcctggcgaataccatccgcgacgaagttaccgttgcccgcatgaatatgcggctgagtggttttattggacggcgtggccgttttaccgagttctgccagcagcaaatctttcgccttatcgacggagcaatcagggtcggccacacactgattctgcagttccatgtgcttattaccgaacatggcaaagagatcgccgatagcgttaacacgggttttctgctcagccaacacctgcgcgcggatcgcattttcatccggtgccgggtctgtttttgcctgcggtgcctgaggctgggtaataaccgggtcacgctgggtagtgttgcgcggcggggtgatcatgttgcgaatgctttttggcattttttcaaattcctcaatacgttttgaatgaatacaggccatagcctgaagggatggtgtcacctggtcggcaaaacccagttcaaggcactcgctgccgttcatccaggtttcgtcctccagcattaccgcaatttcttcggtggattttccggttttctgtgcataagccgggataagaacggattcaaccttgtcgagaagatccgcatagtcgcgcatatcgctcgcgtcaccaccagcaaacccccagggcttatggatcatcatcatcgtgttttcaggcatgatgaccggattgcctaccatcgcaatcaccgaggccatggaggccgccagaccgtcgatatgtacggtaatcgccgcgccgtggtgcttcagcgcgttataaatagcaattccgtcgaagacatcaccaccgggcgagttgatataaaggttgatgtgggtgacgtccccaagtgcccggagatcattgacgaactgtttcgccgttacgccccagtacccgatttcgtcataaataaaaatgtcggcctcactgttattgctggcctgcat

SEQ ID NO: 1319 - DNA, 1500 bp, Escherichia coli
ttactttttgcgctggctttcggacggtggcgcgcccggttctttggcttcggcactggtgcctcctttatcattggcggggtcggtgtcaaacaccaggccctgttcacggttctcgtcaacctcagctttacggcgtgacttaacatcatccgggttgcgaccgctggcacgtatccagtcggattcagtagcagcaccgccgcggatctgcgttttccaggcattcgcttctttaacgggatcaatccacggcataacgggccccgaataaaccgcgttataaagcgagtccatatcaatgcctctcggcagcttgatttctccggcagcaatagccatcttgagccaggctcggtacatgggccgggtcactgaaccgatgaaccagtcctgaagaatcagatagccgtcggttgactcgacaagctcctgccgctgggcactgtacgttccgttgtagtttctggatgtgctggaaaagctgaggcgactgccggcggacacggcacgcagctgtccgttacgaaaagattcgaggttagggttcgggcgatcggatttaatcatcccgatttcttccccggcctgcagttcgtcatagagcataccgggctgaatcatcagctcgcggtcatcgctgcttgaatcagaatcgaagctctgtccgtcgccttttttgatatacatgccgagtgccgcagcaattctggcagcagtaagctccgagtcctcgtattctttcagcgcgctcagacgcatcagaacaccagacaaaagagacgttccgcgggtctggtgcaggcgtcgggtgaatttgagatgcagcatgttctctgcatctatctctttggtatcaaactgacgcccggatactggcaggcttttatagacctgatattttttcgggcgtccccagttatcgacaaaaacgccctgattgagctgggtggcagcatcgctgttcatcggcacaaagtccggctccagcgcttccagccagaacggcacgccagcaaccggctgaagaccatttccggtaccgcgaaccagctgagcaaatacctcaccgtcccggagccacgttcgcagcatcagccgctccagcattgggcgggtaaactgggttgtgacatctggccttacggaccattcgccccactttcggcggatatcagtggccagctttttagcgatcttcccgttactcagcatcggatgcggttcaactatgatgcccttcgcacccaccaccctttcttccagcttgtcgaaaacgccgatcaccagatcgtggttgttatccagccagcgcgcctgctgcctcagcgaaaccgcccccatctggctgagctgatcggctgaacgattttccttctgggctttgtgggtacgcgtttgctttaccgcctcatacgctttaataactgcgcgggcacgcaggcgtgaggctttccagcctggtgaaaacaggccaatcgcatcatctaaaaaactcat

SEQ ID NO: 1320 - DNA, 216 bp, Escherichia coli
tcatccaaacctcgccagcctgtagccgggtcgcccacggcgtttgttattgagcgttgccagtcgtcgctcccattcctgacggccttttctgatttccgacaggttttcgagcgtcatctgctgcccgttgaaagtgattgatttcccctccagaacagacagctcggctgcagcatagcggtcgatcatgttttgaatatctgctggattcac

SEQ ID NO: 1321 - DNA, 2103 bp, Escherichia coli
tcacacccaacctcctgacgaagaccacggattagcctgctcggttacgggcttctcacgttttggttttggtttagatttcggcgcaggcggcggggatggcatttcgccagcttccgtctgcgtgtcctcgatccacgtttcccgccgtgcccactcaggagctgacggccatttgattttttcgtaaccactaaggatggcgagcgcgtcggcataaacgagcaggtcaaatgcttcgtttgcgccccggccgggcttactccatttcccttcattcgagcgttcctcatacgtcagttcgtcatagaaccagctgcccagccaggcggggaaatgcacatagccagggccgggtgaatcacgccacagcgcattattcacccggtctttaagggcatcggtctggagaagataaagaggcacatcaccagtcgcctgtgcgcggcgcgttgatctgcccgtgttgtcgggaaacgttcgctggataagtttgctgcgcctgacgctgtcccctttgaagagatagatacgcttacccagcccctcacggcgacatctgcgccagaacttgtaggcattatccgtcacgccatcttcgccccctgagtccacggccatcgacatcagccgcatgccctttgatgggtcagctgcgagcggccacgttttatcaaagacgtcagtgagtaaaagatcccagtcctccggatagctcgccggatccacctgaatgctttcaccgttgccgtcgcagcgcagcgaatgccggatgttgtaacggtcaactatccagcgctcacccatacttccataacccgtaatctgcacaacaaagcgccggttgcgcccggcctgcacgtccacggtcgcagtgagaaactgcacgccgttcggtaccgaacgttttgggacgtcttcggcacgctgctcgagcaattcacttttacgctgctccatgctggctcgcggcaaatagggcctgccgaaatcggtgttgatcaccgtcttcagggtttcttcgctgcgcgtggattcatattcctgctcggcggtcagaaacttataaataagctgcgcccaggtctggtaagcagctgccggaccttccatccagaaggaggcaatacgggaacgacggccatcaccgctaaccaggcctttcctgtcgatggtttgcccgtcccggagccagacacatttcatgttaagcgcacgcttcatgtccggtgtgatcctgcctttacaggcagggcactgaagaaacgccgcttcgctggcaagcacaggatcgctgctgtcgcggtatccggtcatattgtccatttccggctggaaatattcgccgcaatgcgggcatggccagtaaagacgacggcggtcaccacggttatagagcgataaaattccggtggtcggaggggcttcatggggcgtggagcgccgccattttgtgtctctgatatccctcccgggcgagctctcaaccagcgtcatcccggaggacatgaatgtcgtggttcgtttcgatgccagtgaaaaagcatccccctccccgtcgatatcttccggaaagcggtcataatccgtcagcgccacacttttatagtccgaggacgacatgatattgacggatggccagcccagcttcagatagttaccggcgcggaatgtacggtcgtagacgttgttatcgttacgtcttgggcttagccgggttttaacttcagggctacagcgaaaagtacggtccaggcgttttttggaatgctcgcgcgctttttcctcagatacctgaattacaagcatatctgccggatcgcagacaatgttataaacgatccagccgtcaatcagcccgatggttttacccgttcgcgctgggcccacaaacacaaccgcatcgtattcacgcgatgccagacagttcatcggctcaatcacatagggtgccagatccggatcccacggaactgagtttcccgcccccattggcacgcgcatataagtactgaccgcatcggccaccggcatacgacgcggggctcgtaaaataccggaaacatcgcggcggatgtccctggcggatgcccgctttgccat

SEQ ID NO: 1322 - DNA, 489 bp, Escherichia coli
tcagtcctcctcaggctgctcctcctcttttccagcgtcctgcaccttctccgccatctggtcgcgcagatcatcgataacgctttgcacacgaactaccgcagcaggcgttaaagcacagtcgcgctcgagcacatccgggagggtttcaagtaccatgacgacggctttcgccatcaatgagaattctcgcgccacttcatctgcgggtattaactgccccgtatcctgttcgaacttcagcctctcgttctctgctttccagtgggacagcctgtcagaagggggcatatcgtcgatgttggccgaaacggtagggatcatcagttcggtcagaatgtcggtcaccagatagagctttaacttgctattgctgcctggagcaggttcaacatttttcagtctcgcggcaaccgtctgacggtgtacgccggttatccctgccagctggttgatattgagttttaaagtggcaatttcctggtccat

SEQ ID NO: 1323 - DNA, 729 bp, Escherichia coli
ctatcgacggcactgctgccagataacaccaccggggaaacattccatcatgatggccgtgcggacataggaagccagttcatccatcgctttcttgtctgctgccatttgctttgtgacatccagcgccgcacattcagcagcgtttttcagcgcgttttcgatcaacgtttcaatgttggtatcaacaccaggtttaactttgaacttatcggcactgacggttaccttgttctgcgctggctcatcacgctggataccaaggctgatgttgtagatattggtcaccggctgaggtgtttcgattgccgctgcgtggatagcaccatttgcgatagcggcgtccttgatgaatgacactccattgcgaataagttcgaaggagacggtgtcacgaatgcgctggtccagctcgtcgattgccttttgtgcagcagaggtatcaatctcaacgccaagcgtcatcgaagcgcaatattgctgctcaccaaaacgcgtattgaccaggtgttcaacggcaaatttctgcccttctgatgtcagaaaggtaaagtgattttctttctggtattcagttgctgtgtgtctggtttcagcaaaaccaagctcgcgcaattcggctgtgccagatttagaaggcagatcaccagacagcaacgcgccacggaaaaacagcgcataaagcacttcattagcagcgccagatagcgtaatgattttgttactcat

SEQ ID NO: 1324 - DNA, 231 bp, Escherichia coli
ctatttgtgggtaaagttcgtagtgcgctgatcgtgcaaaatgattttagttgggaacagttcgcaactctgtcccataaaaatcagcatattcccatctatcccatatccagcgcattgaccatcgggatactgaagggagattccatcatctcttagaaagatcaccatctcttttgtttcaatttgcatatagctacctggaggatttatgaatgcaaggattttcat

SEQ ID NO: 1325 - DNA, 597 bp, Escherichia coli
atggactattaccatgagattgattttccatctttattcgcgagagcagtggaaagcgatgacgatgtgggtactacattgcgcattcacctactttgtgagcgcatggtcgaagcatggatatgcgcatgctgtgactgccaagatctctttggaagagataaaaacaaacttttaatcgaatgtaatactaaaatatccatggcgggaaacctgggaatccccccggaacttatgaaatcacttaaaaccatcaactcaatgcgtaatgaccttgcacacaatccatcaatacaaagcattgctgattcaaggatccagagcctgaaggatactctgactgaatactttaaacagcatccaacggaacccagcatggaagaatcaaaactgggtatttttaacgccgagaatcaattaaccgaagaagtttccttagatagtgacagttcaaaaaacagacttaagttaatcttgctgttcagcaagttaatgcaggcgttaatgcaattagttgcagctaatcataatgggcgctgggataaccaatttagccaattcgtttaccatgtgaccatgaacgcaacaaagagataa

SEQ ID NO: 1326 - DNA, 198 bp, Escherichia coli
ctagtcgtcgagttgcaacacaccgtgatccagtgattctgaataggcgataagtccggtataaccggggataatctcaccattatcagcttcaaattcaggaattgtgccggtggtgatggtgtattgaggctggccatcttccttcgcgaaggctgccaggtcttcaatctgcttagctgtaagaactactgtcat

SEQ ID NO: 1327 - DNA, 480 bp, Escherichia coli
ctattggttattcgacagtcgcactgattcgtaaatccgctcacacgtcattcctgcccggtagctttcgtcagatcgtccagcataatatcgagctgcttctgcaaggcttccgagcatgtcggcaagcattgctgcgttggctccggctgttttgcttctgacggaagtggcgagatctgcggtgtgctttgcggcgtccatgtgggtagcgagttttgttgcttcggcgcgcagctgcttaacagtggtagccaggccagcagaagtaacggcagcgctcgctgcttgagcttgagcatctttaacggcctcatcccgggcgattgttcgcccttgttcaatcatacgagctgcggtctgtgcattcgcttcctgtgaagattccgcgctatcccggtcagcccactttattttccagctgcggttcgtccactcactgccagcgagaaacgaacctaccaacgcaacaatcacaat

SEQ ID NO: 1328 - DNA, 549 bp, Escherichia coli
tcactggtctatcccccagcacgtcagtgcgctttcctggtcccgccgttctacctgcccataacatccatccttctggcccttggtcaggcggcaatcgcggccaccgtctttaatccaccagcggatagcttcacaggctcctttcgtatcgccagcattaattcgcttatagaacgtagacgggaaacattttccggggccgatgttatatgggcagaaagaagcgatacccgctttctgtggttcggtcagtggtactttgatatttcggtcaacccacgccagcgccttgtcgcgttcaatggcgtttacctgggcgcatttctcagctgacagcttcatgccctgtactactggcttgccatcaaccattgttgcaccacggcaaatggtccagagtccgccgccgtcgcgatatgctgtcaagctgttaccctctttctcatccagaaactgatcgagaatcacgggtgcggaagccccggcaagaatcaaaccaacgaccgctgcgctcaatttattcttcagctttagagacatagccat

SEQ ID NO: 1329 - DNA, 279 bp, Escherichia coli
ttattcttcagctttagagacatagccattgcgccgatcctcccgttctttccagcggaaataccagttcactgcacaggtgattaccgtgcatgcgataccgacaataattgcccagtcgctcaggcttaaccctgcaattctgtcggccaacatccaggacacctcttttgctgttttagctgtttcggcatatgccttcgctgatacaccgcagccggcaagcgtggttcctgatccatatgaaagtctgctgtaaatggtgctcattctggtcat

SEQ ID NO: 1330 - DNA, 1053 bp, Escherichia coli
ttatgattttttcagtttttccacctcttcggtggtctgtataaacctgtctgcctccagttctacgccgatcgcccgacggccaagttctattgcagctttcacagttgaaccagagcccataaagaaatcggcaacgatatcccccggtctgctgctggcgctaatgatctgtttcagcatgtcggcaggtttttcgcatggatgtttgcctggataaaactgaacaggcttatgtgtccatacgtcggtataaggaacaagagcggaaacagagaagcagcgccgaaggattttgtattcctccagcaattctgaatacttgcggtttaatgactggtaggtagccaccagctggtggtgaggatgttcaagcttttgctgaatatgtttatcgatggcgatccgcgtgaacagttcctgcaattttcgatagtccacttcattcggtagttgccattggcttgcaccaaaccagtgtgacgccatgtttttctttccggttgcctcagctatttctttcgagctgacacccagtgattcacgggcattacggaagtaatcaatcagcggcgtcataatgtgctgctttagctctgtgcttttcctttcgtaaacatcctctttacctgtatacggtccaagatagtgctcagcaaacaaaatccgttccgtagatggaaagtacgcacgcaggctttctttattacatccattccagcggcccgatggttttgcccaaatgatgtgattcaaaacgttgaatcgggcgcgcatcataatctctatatctgaggccagtcggtgaccgcaaaacaggtagatgctgccagcaggtttaagaacgcgagcatactcagccaggcagctatcaagccagcgtaagtagtcctcgtcccccttccattggttgtcccagccgttgggcttcactttgaagtacggaggatccgtaactataagatcaatagagttatccgggagggtggcgacgtaatgcagactatcagcgttgattaactcaacactgtttatttttacagtatttttcat

SEQ ID NO: 1331 - DNA, 192 bp, Escherichia coli
ttactggaggcgtttataacatccgaactggtaatcagataaccccgccatcaccagctgcgtaagtatgagctggcaacgttcgtggctgaggtgggtattctgtgcaatctccccagccgttgctggtttatcgcttaattcattgaaaacagcctttgccgtttctgtcatatcttcctgatttagcat

SEQ ID NO: 1332 - DNA, 900 bp, Escherichia coli
ttagcaaatattccacatcatcgtactaccgttatggttttcgataatttttgcggctgggctagtaccaaaagagtgcatatagcaatgatgaatagtaaggaccagatcctgcaacgtttggtcactctctagctccatgatatttaaaccaatattttgagctttgtccaaatgaatatgtctggcatgtgcatacgttgcttggtggttgtttaactcatcacatatacgcttagccttagcttcagcgtcagcctgacctgcgaacataccagtacaaagccatttctggacaatttcgttcgcccagagaattgctttttcacactcgccaatcaacgttggatttagtttttggaacgtaaattgccaccattgcagtgcagcagggttggcaaaaatttccgcttttgctctctcatactcctcaataattgcatgagatgataacccattaaactgtggatcaattggccccaagttcgactgtttacctaaaacgatctgctcagcacaacaagcaagcattgtgccacaactcattgaaatcataggtacaatcgctcggatattggttccgaactttgaacgaagataatgaccaattgattctagagctgcgatatcgcctccaggagtatggagtaagatatccaatcccagactcgtatctaacccattgatagcagacataagaccatttttatcatcatctgacatctggatcagatgttgaaacccaggcccccctttttgaaggaagcctgagtaataagaaattacatttcggccagtatgtttcgataaatcacgtaagtacttgtggcgaacctcatccgctggtgtacgttgagcgatagtacccatctcacccaatacgtctatccaatttggcat

SEQ ID NO: 1333 - DNA, 207 bp, Escherichia coli
tcagtatgagtacagttggtgagattgctgaccgttctgctcagtagtatttggtgttactgtgctgtatgaatagagcacaccacttctcacattcagatcgttttgctgagcgagaacacgcatagcaaaatgctgtacggattcgcctttttgaaactcttggggttgtatgcccattttttcgtaaaattcagcagcgctcat

SEQ ID NO: 1334 - DNA, 690 bp, Escherichia coli
tcacatttctgccactttgagggcttcttcttcctcatagtattcaagagccatggccaacgcagattcatcaagctgggtaaaagcggcctttaacccagcccagtgccctgaatagacacgcaaccatgtcgaacggtcaacgctaaccatgcgggccaacgctgcaccagcatagtctttataggtttcattatttctggttgcggcaatttcctgccctgccagccataccaggcctatcagtttctttactacgcgctcctgaagggagttatcacccaggcatttctgataagttttccagacgtattcacacatcatcacctggtgcttatagctaaggtcaaaaccgtagcagtaccgcaaccaggcctgctggtatccactaagcgcggacactgccctacgccacggcgcggactcaaattccgcatcttttatcggcggcattggcctgcggcggctgcgtgtttccagcacatacagtggcgcggaaagtgagttaacaaagcgtggccccttctctccttcgagttcgacgagatgaattccacggcgaggggtggcatttttgtctgctggtgggtgttcactgaaagcctcaagctgcccttttgttcccccagacaggtcaggtagcgcgcggcgcaattctattcttacaaaattcaggtcttgttgattcat

SEQ ID NO: 1335 - DNA, 996 bp, Escherichia coli
ttaagctttcgcaattacgccgatcgccagcgcccgatccataaaacgcagtagcagctcaagctgcgtaccatgcttctgctcgaatgccggtacatcggcgtgtaactcgtcgtggcactctctgcacagagggatcacgaagagatcatgggcttttgttgctgtcccccccataccgtgccctacgatatggtgcggatcatctgctggccgtcggcaacactcacagggttgtgttttaacccagcgggtgtacgtctcatttatccagcggcgtcgctttggcctgagcatgaaagattctggagactccggatcaacagagagcgtgaggatcttcttcgccttctcctgcacgaggctggttgcagaagcggaaggcacaatgtcgctttccctcatgaccgagcggatcttatcatccggaaggcgtagccccttgtgcgcaacgctttccggaataacatcagccaggtcgtttctgaccatccaccagcacagttccggaagcgtcaggatatgcgactcgggaaaaccagaatcacgccgaatgacttccagaatccaggataccaggtttcctgccgctatacctgcaagctgttcggtatgctgccccgacaaagtgtgatcgcaatgccagcacaggcgaatacttcctggtgggtgccgcattgttgtgaagttcttgtcgtgccacgatgaatgtggccactggcattcaaaccgattactcaaccattgctcaagggaaggaagcccaccagcacgctgaataacccgatcattctcgaagacctgccgcattaccggatcatcagccagcggctgaatggcggcgggaacagctcctgtactgaatgacgccatttcttctggttcaggctcaagcagaacgcgaccgcgcataaagaggtgcatcagttccgcgccgggacgaaacaacacaatccccatacgatgggcgatctcgggggtaagcagagctctcac

SEQ ID NO: 1336 - DNA, 684 bp, Escherichia coli
tcacgcgacctgccccctggcaatgtgttctgcccacagtccaccaatccagcgcacgcctttcgccgtgaaacgtgcctggctgaatgcatgatttgaggttacggatgtgccggttttcacttcaaaacggcccgcatcaatatgctgatgccgtggggtcatcgttccgccaagacgatacatgatgtcgttctcaaggaggaataaccgcagatcgggctctttggccttaagcagttttgccacctggcggaatgacattgacccactggctgtacagtaccgatcaacaaacgctaccttcggcgccgcggcagccagttcgttagtcaactgctgtttttgttctgcaaggtcagctgcaagacgtagggcttcagagaatgattgaggaatcgtctgctgctgtgcctgctcaagctcctgccagcgatcaaccagacgcgcggtaaactccggcgacagctgcgcgacaacgatataactgtcccgcttccctatcagataaaccgataccgactgattgaggtgatttttaacttcccccattggggggagttcaataacaccgcgctctgccaggcgttcaatggaccgtttaacatggtcatgtcttgattccaccagctcagcaatatcgctgctggacatggttaacgctgttgttgctaactggctcat

SEQ ID NO: 1337 - DNA, 387 bp, Escherichia coli
tcaggcggctgcacccgccggttcatatctgctgattgttatctctacccgacctttcggcacaacgggtccccattccaccagcatgcgcttaatctggctgtcgtcttcccagacacccgcatgcgtcagcgcgtcaaacagggctttgttgtaattatcgatatcccggcggcgcgcatccggcgggtacagagtgatttctaccgctgccagttcagtcgatggcttcgggagacgtcgtaattgctcaatgatcgccacgcaggcagcgctctggtatttacggccagcggcgctaatgaggtgacgaccggccagcggccccttgttaggggcgcgccagtaagtgttcacgctcggaggaaaaggcaggatcagtttcac

SEQ ID NO: 1338 - DNA, 1320 bp, Escherichia coli
tcacgcggcctctccccgcatattgcgaacaagttcagaagcagcagtaatgatttcgctggtggcagtccgctccagccagagttgattgatattggctttcagcttgtgttgcagtgactcatccagcatgtcagcaccatccacctggtcgaatacaattctaacctccagcggccagatacgggactcgggaagcggatccgatactggtttagctttctcacgaatgtgcatgcggatctggcgaatattggaccaactggaaacatccaggcttcccatggctgcaatgaagtcagtgctgttcatgccatattcaccggatgcttcaagggcaacagtgcgaatacgttccgacatatccaggcgcacagcagcgtcatcgaattcaatcgacaacagccactcatccacaccgaacaaaatactctcacgaataagcagcttcgctttgtcgatcgttaaaggtgatacctgagtgaattccggtgcttcgacagaatccgccgcccaggtatgcccaaacttcgattcactgaatgtgtattcttctttatcgccaaacgcagctctaacgcatgcccacgcctcgacaccgctgatagcaaaaatatctttctgggtgagtggcaactctgcttctggcttatcagctgcaggaggtgtggcagttacaggttgagacttgctggcagcaaattgtgccaaagccataaacgcccgcccttttgcctccagttctgtgcggttgatatagctgaaccgctcgccacgccatgacttatcgaatacagctatggcaccggcaaaaaacgcgctggtgggtttctgtttttcgtcagcaggtacaaaccacacaggcagatcgaacccaatgcgcccgcgaatgaatacaatgtgatcggcatcttccggccaccacgtttcactcggcgcggcttttatcaggaatacatagcgaccgcccttctcgcgctgggctgctgcgtagttcatgatgtgcgtcatgccggtgatcgcctgcttctcgtggtactgcgaacggctatacggtgggttgccatagccagcgccacccagttcagccagacgttcagaccagtcctgcgtcagcgcgttatcttcggcggtgtaccatgccgggcatttcgcgttgtcgtcgtcagcaaacaaatccagaactaatggaccaaatagcgcgttgatcccccaaaaaagcagatccggtgtccgccactgatcgccaacctctttcaattcgtgagctggtttgctacgcagtgccgccagcgcctggcaatatttattggtcatcat

SEQ ID NO: 1339 - DNA, 882 bp, Escherichia coli
tcatgaacggaaccccgaattttctggcagtgagtaatcaacactctggaagtttgcgcggctggctgagttagtctcccatttgccgttaacgcgttcaggccggccagcactggaccatttggtcgcgctttgcaggtaaccagggaagttttttggaatgaacagagttgccgggcggaggtattgcgcctgctcgctatcacgccaatcggcatttttgtaatccactaccaagcacaggtcatcaacagtgaattgttcccgaagacgggcgcgaatattctccagcgacgtgctgcatacctggtagcgtgagccagtagtctgattcaggtaagacaaaacctgtctggcctgatcagtaatcacaacctcagggtcgggttgcgccgcaaccggacaagagggttttgaagttacttgtggttcttgttttgattttactgacggatccccaccagattctgacgggtcaaaaccgccttttttgctggatttcgacgcctcaaattttgacgggtcggattttgatgcatcagattttgatgggtcagattttgatgcgtcagattctgacaggtgagaaaaagcagcctctcgcaacttaacgacgttaagctgatatacgttcgatgcgttacggttcccattacggcgctgcttacgggaaagccagccatccttctcaagctgagcaagggccgtccttaccgtactttctccagcaccgatttgacgtgcgatcgtgccaatagacggccagctaacaccctcatcactactgaagtcggccagacgcgccatgatggcaacgctggataacttcatgcctgacgaagcgcatgcatcccatacgtaaccggttaatttagtgctcat

SEQ ID NO: 1340 - DNA, 339 bp, Escherichia coli
ttaattctgtaaatttacgctggaattgttcaagagggctgaagcactcatgatcgtacccttcgcgaaggtatataacgcgctgtgtatctggctcccagcggacaactctgacgggaactccgtagtgatctctgaaccgccggttaacttcagccattcctcgcgccccttctcgttcatctgaacaaatgcttctaccatcaagtctgctggctggtagttgcctccatcagccgcgttatttatgatttccacatagccgaactgggcatctttacccaccagcggcaaacatctgaattgcttagctggtctgaatcggtttacactgttcat

SEQ ID NO: 1341 - DNA, 564 bp, Escherichia coli
tcatgcgttagtttctccactgatacgacacgccaaggcgcccggagctgcacactcgcgggcgtcaccttttctgcctgttgaaacgaatacgtcaatcgcctgatctgaaacaccaaccccataaagcgccataaatcccaggaacccgtgaatctggtggcggagcttcttactgaataattctgaaagcattttgcgctctgatgaatcaattaccccatcagccgctgctgccatcttggcattagccagctcaccagatgctgctgccgctttcatctcaatgctgtacagctcaacgttatccaggctctcagcagttggaacatccaccagccatttcccttttcggttcgcctggtactcggccaagtaacaagaaccagacaggtcctccatccgttccagttctgccaaggtaaagaaccgactgccacacttctggtacaggtggttgtggaactggtcgatagtcatccctaaatcggaagccatacctaagcgaccatgcttgtgtgccttacacatcaggcggattgctgtatttatgctgtctaccat

SEQ ID NO: 1342 - DNA, 258 bp, Escherichia coli
ttaaagttgactattgttgttagcggaaggtatgccgtcatttttgttcggataaatatcaggtcgtaattgatggggagttactacccatccgccccattggcagagttgaataactctttcagaaggtactcggttctttgcaatccagttcgcaacagattgaactgattggaattcaaaccgccttgatacctctgaaatcgacccgatcgccttcacagctttagctgttacattcttgtgttgagatgacat

SEQ ID NO: 1343 - DNA, 711 bp, Escherichia coli
atgccttgtgcgcttaatcttctacttatggtggaaaatgctaaatacaaagactttgccgaaaggctaaacaggtctctccaagagcaatctattggagttaaagaattgtcagagttcagtggtgtctcgtatgagatggcgcggcgctacactcttggtactgcaaagccgagagatgagaagatgattcgaattgcagaaagacttgccgtctcaccggcttatcttgattatggtgtgcctgttaatggtggcgacgcgccagccaaaggcacggtcagaatagagcaattggatgttcatgcttcagccggttccggatatataaaccaaccattccctacaatagtgagctcaatagagattccagaagagaggatcttcgagttgtttggtcgtagaagccttgatggcatcgtcatgataaatgttgatggcgatagcatgatgcccacgctttgcccaaaggacctgcttttcatagacagcaaggttgaacaattcagcggcgacggcgtttatgtgttcaattttgaagacagtacgttcgttaaacgtttgcagaaggtaaaagggcgccgactggcagttctttcagacaatgaacattacccgcccttcttcatagaggagcatgaaatgaatgaactatacatattcggcaagctaatcagatgcttacctctaaaaatgatagagtttggctaa

SEQ ID NO: 1344 - DNA, 198 bp, Escherichia coli
ctatttaaagagcttcttcagcttgtcctcaaccttcctgatttcggaagtaagctggctgctgttgacattgatagtagctccacatcgacaagtgaaacttttgttcgacttgagccaagcgattttcttcttcgtcttagtgccgcacttagggcatgcgggtaacgtaatttcctggttatcaaaagcgcccat

SEQ ID NO: 1345 - DNA, 918 bp, Escherichia coli
atgaataatccgtttttcaaaaatatgttggtgtatcgcattagtcgcgatttcaccatcaaccaggaagagctggaacagcagcttgaactatttcgcttcactccatgcggtagccaggatatggcaaaaaccggttgggtatcaccacttggtcagctgtcagatcgcttgcatcacactgtcaataatcaagtgttgttggttattcgccgggaagaaaaaatactgccatctcctgtcattactgaagaactgcgcaagcgtgtgtcgcgtctagaatccgatcaggggcgtcgcctcaaaaaaactgagaaagattcgctgcgtgatgaagtgttgcactccctgcttcctcgggcgttctccaaaaactcgactgttggtttgtggatcaacgtcaccgacggtctgatcatggttgatgcagccagcgctaaacgtgccgaagactcactggccctgcttcgtaaaactctcggttctctcccggtggtaccgctgactatggaaacgccgatcgaactaactatgaccgactgggttcgttccggtagtgcgcctgctggctttggcctgggtgatgaagccgaactgaaagctattcttgaagatggcggtattggacgctttaaaaaacagactctggtcagtgacgaaattcatgtgcatctggaagctggcaaagtagttacaaagctgtctatcgactggcaacagcgcattcagttcgttctttgcgatgacggcagcatcaaacgccttaagttctctaatgagattacagaacaaaacgacgatatcgaccgtgaggatgcggctcagcggttcgacgctgactttgttctgatgaccggcgagcttatctctctcattaacggattaacaacctctctcggcggcgaagccaagcgataa

SEQ ID NO: 1346 - DNA, 540 bp, Escherichia coli
atgagctacattcagacattatccggcaaacattttaattacctcgatatccaacaggacgatatcgtgatcgaggatattgctaccgcgttgtctcatatctgccgctttgcagggcatcttcctgagttttacagtgtcggccagcatagcgttttaaccagccacctcgttccgcaggagtttgcattagaagcactgcttcatgatgctgctgaagcctacctgcaggacatcccctccccacttaagcgcctgcttccggattaccaggcaatcgaagctcgtgtggacgcagccattcggcagaagttcggtctaccaactgagcaacacccaaccgtgaaatatgccgacctggtgatgctcgccagcgaacgccgcgattttgagattgacgaaggttccatttggccatgcctcgagggagttgtcccaacggatttattcattatcaacccagttcgtcctggccagtcatacggcatgttcatcaatcgctttaacgagttgatggagcagcgccaatgcgccgcatga

SEQ ID NO: 1347 - DNA, 255 bp, Escherichia coli
atgaccgtatttgaatatctccaggctcatccgaataccaccagcggtgaaatcgccaaaggtatgaacaaaaagaccccagcggtcgccggagcattatctcagctctatggcaccggtcggatcgtgaagtctggtgttcgcaagggtattccaacataccgcattaacgatatgccgtttggttgcagtaacagcctaaccatgatgtttaaccagctcttgagcagagccagacaaggagcagcccaatga

SEQ ID NO: 1348 - DNA, 348 bp, Escherichia coli
atgacagcactcaacaaacaggcgctgcgtgaagaattccagttcatgcaggacaactatagcgacccggcagaccacgatcggcaggtgatttacatcgaggcggaggcgctgctggatgagttggaagccaaagactcaacgatagcagcacaacaacatgagatccgtatgttgctgaatgcgcttgaggaaaaaccatgcccgaaatgcaacgacacaggaatgactgatagtggcggcacgcagccatggggcgagccgattgagattgaatgcgactgccgacagcaggatgccaacaccgcagaacttgtagccgctggcattggcgtgaagggggagtga

SEQ ID NO: 1349 - DNA, 309 bp, Escherichia coli
atggataaattaatcaaacctaccgccaaaggtaaatatgacggttcatgtgattatctttgctcggaagatgcgcgattcatcgttatgcgcggcgattatacggaagcggaaataattcaggcttctgtgtctcaagatgtaatcgactcggatggtgcggctgattttgcaagtagcgcccgctattatcagtgctggtacaaagttagcccaataggtggtcaggatggctattcaggctggcatcatcctcgtgattcgccgtgtcgcggtgcatatttcgcatcagttttgcaatgggattaa

SEQ ID NO: 1350 - DNA, 468 bp, Escherichia coli
atgacaactaacaaccacccggcgcacggtcctgtatcactcgatcgcctgcaccagatacgcgaacacctgctgcatgatacccaatactcaaacggcgggaacagagcctacattctcgctgatgtattgaaggtgattgatggggctattgcccgcgagctggtacgccgtgagcatgcagcgtggtcacaggctactttcggcgatgtcggtccagttggtccgctgaagcacctttccaaagaagcgctcgaggctgctgctgaaccaggcgaccttagcgaatgggctgacatgcaattcctgttatgggatgcgcaacgtcgtgccggtatcagtgatgagcagattacccaggcaatgataaaaaagctggctataaataaggttcgccaatggcctgagccgaaagacggggaacctcgattgcatatcaaagaacagtcagagcaggagaaaaaataa

SEQ ID NO: 1351 - DNA, 255 bp, Escherichia coli
atgtttagcctgattcggcgcggtcaaatctacacggacagtagcaactggcccgtaattatccatagctgtagtgatcactcggtccgaattaaacgcaatgatggcgagctgagaacgattagcatcaaacgctttaacgaagattttgaacgagtggagcatgatgagtatcgcaaaatatgtgccgaaatagagcaggaaacaaacctgaaaaacctacgtgcgatgcgtcgcggcaagattactgaatag

SEQ ID NO: 1352 - DNA, 570 bp, Escherichia coli
gtgaacaacttaatgatcgaccttgagtccatgggcaaaaaaccgaatgcccctattgtctccattggtgccgtattcttcgatccgcaaagcggtgaactgggtcaggagttttacaccgctgttaatcttgaaagcgctatggagcagggagcggtgccggatggtgacactattctgtggtggttaagacaaagctcagaagcacgatcagcaatctgtgttgatgatgcgatgccgatatcatctgccctatctgaactgagccatttcattaatcggcattctgataaccctaaatatttaaaagtttggggcaatggagctactttcgacaacgttatattgcgcggcgcatatgagcgtgccggccaggtttgcccgtggcaattttggaatgatcacgacgtcagaaccatcgtcacattaggcagatctgtaggtttcgatcctaagcgtgatatgccatttgatggggttgcacataacgcactggctgatgcccgccaccaggcgaaatatgtttcagcgatttggcagaaactaatcccaaccaccagcaacagctaa

SEQ ID NO: 1353 - DNA, 237 bp, Escherichia coli
atgagcaatattttccagttagctcccaacgattgggtttgtgaaagcgttttgatcgcggttactgggctcaaacccggaaccatcctccgtgccagaaaagaatgctggatgattgggagggagtatatccacgtatcgcctgacggaaatcctaaaccttccagtgagtgcatgtataacagaaaggctgtagatgcctgggtcgcttcaatgaaaagcaagcaaccagggtga

SEQ ID NO: 1354 - DNA, 1314 bp, Escherichia coli
atggataaagtcacatatccaacaggcgtcgaaaaccacggtggcacattacgcatctggtttaattttaaaggtaagcgtgtcagggaaagtctcggtgtccctgacaccgctaagaacaggaagatagccggggaactgcggacatcagtatgttttgccatccgcacaggaacctttgattatgcaacccagtttcctgactcccctaacctcaaggcttttggtgtaagtaaaaaagacattacagtgaaagaacttgaagaaaaatggctggatctgaaacggatggaaatctgcgcgaacgcatttaatcgctatgaatctgtcgcaaggaatatggtgccgaggatcggaggtaatcgcctggtgtcagcagtaaccaaagaggaattgctgtatctgaggaaatatttgctaactggttatcagaatccgacgaaaaacaaagccccggcaaaagggcgaagcgttgttactgtgaactattacatgacgacaatggccggaatgtttcagtttgctgcggatcacggttacttagaggtgaacccattcgagggaattaagcctctgaaaaaagccagggcagaaccagatcctctgtctcgtgatgaatttattcgcctgatagatgcatgccggcatcagcagacgaaaaacctgtggtcattagcagtgtacacaggaatgcgtcacggggaactggtctccctggcctgggaagatatcgacctgaaggctggaacaattaccgtcagacgtaattatacgaaacttggtgagttcactctaccgaaaaccgaggcaagcacagatcgagtggtgcatcttatccagcccgcaatcagtatcctgaaaaatcaggctgaaatgacaaggctgggcaggcaatatcacattgaagtgcagttacgtgagtacggccgttcggtgaaccatgagtgtacattcgtctttaatccgcatgtggtcagacgcagtaagcaggtcggatttatctaccgggtcgattcagtaggcgactcatgggaagcggcacttaagcgtgcggggatcagacacagaaaggcgtaccagtcacgacacacctatgcgtgctggtcattatcagctggtgcaaaccctagttttattgccagtcagatggggcatgcgagcgcgcagatggtgttcaatgtttacggtgcatggatggctgacagcagcgcagagcagatcgcaatgctgaatcagaagctggcagattttgccccattgatgccccatagccacgagaacagtacgggaggattattaaaatcagtaagttaa

SEQ ID NO: 1355 - DNA, 726 bp, Escherichia coli
gtggagggtaacaccacgctttatgccctgccgaaacccgaggttgtcctgcgctggcgtgagcagaccacagatgacttccgcttctgttttaagtttccggcgaccatttcgcatcaggcagcattacggcattgcgatgatttagtgactgaatttttgacccgcatgtcaccgttggctccgcgcattggacaatactggctgcaactgcctgccacattcggcccacgggagctgcctgcgctttggcattttctcgattctcttcccggtgaatttaattatggggtggaagtccgccatccacagtttttcgccaaaggggaagaggaacaaacgcttaatcgcggtttacatcagcgcggcgttaatcgggtgattttagacagccgcccggttcatgcagcacgtccatacagtgaagctattcgcgacgctcaacgaaaaaaacctaaagttccggtacatgctgtactgacggcgaaaaatccactgatccgttttatcggtagtgatgatatgacgcaaaaccgggaattatttcaggtctggttacaaaaattagcgcagtggcatcagaccactacgccttatctttttttacatacgccagatattgcccaggccccggaactggtacataccctgtgggaagacttacgtaaaacgcttccagagatcggagcagttccggctattccacagcaatcttctcttttctga

SEQ ID NO: 1356 - DNA, 396 bp, Escherichia coli
atggtaagcgcgctgtatgccgttttaagtgcgttgttattaatgaagttctcttttgatgtcgttcgcctgcgaatgcagtaccgcgttgcctatggcgacggcggttttagcgaactgcaaagcgctattcgcattcatggtaacgcggtggaatatattcctatcgcgattgtgttgatgctgtttatggaaatgaatggcgcagaaacctggatggtgcatatttgcggcatcgttttgcttgctggtcgtctgatgcattattacggttttcatcaccgtctgttccgctggcgacgttctggcatgagcgccacctggtgtgcgctgttgctgatggtgctggcgaatctttggtatatgccctgggagttggttttctccctgcgttag

SEQ ID NO: 1357 - DNA, 744 bp, Escherichia coli
atgtctcaccgcgacacgctattttctgcccctatcgccagactgggcgactggacctttgatgaacgggtagctgaagtcttcccggatatgatccagcgttccgttcccggctattccaatattatttccatgattggtatgttagccgagcgcttcgttcaacctggtacgcaggtttacgatctgggttgttctctgggcgcggcgacgctctcggtgcgtcgcaacattcatcatgataattgcaaaattattgccatcgacaactccccggcgatgattgaacgctgccgtcgtcatattgacgcctataaagcccctacgccagtagacgttattgaaggtgatattcgcgatatcgccattgaaaacgcatcgatggtggtgctgaattttaccctgcaattcctggaaccttccgagcgccaggcgttactggataaaatttatcaagggctgaacccgggcggtgcgctggtgctttcggaaaaattcagtttcgaagatgccaaagttggtgaactgctgttcaacatgcaccacgactttaaacgtgccaacggttacagcgaactggagatcagccagaaacgcagcatgctggaaaacgtgatgctgaccgattccgtggaaacccataaagcacgcctgcataaagccggttttgagcatagcgagctgtggttccagtgctttaactttggttcactggtggcattaaaagcagaggacgctgcatga

SEQ ID NO: 1358 - DNA, 972 bp, Escherichia coli
atgatcgactttggtaacttttattctctgattgccaaaaatcatctttcacactggctcgaaacgctgcccgcgcagattgctaactggcagcgcgagcagcagcacgggctgtttaagcagtggtccaacgcggtggaatttctgcctgaaattaaaccgtatcgtctggatttattgcatagcgtaaccgccgaaagcgaagagccactgagcgccgggcaaattaagcgcattgaaacgctgatgcgcaacctgatgccgtggcgcaaagggccgttctcactgtatggcgtcaacatcgataccgaatggcgttccgactggaaatgggatcgcgttatgccccatctttctgatttaaccgggcgcaccattcttgatgtcggctgtggcagcggttatcacatgtggcgcatgattggcgcaggggcgcatctggcggtgggtatcgatcccacgcagctattcctctgccagtttgaagcagtgcgtaaactgctgggtaacgatcagcgcgcacatttgttaccgttaggtattgaacaacttccggcactgaaagcctttgataccgtcttttcgatgggcgtgctttatcatcgtcgttcaccgctggagcatctctggcagttaaaagaccaactggtgaatgaaggcgaactggtgctggaaacgctggttattgatggcgacgaaaacacggtgctggtgccgggcgatcgttacgctcaaatgcgtaatgtctatttcattccttccgcgctggcgctgaaaaactggctgaagaagtgtggttttgttgatattcgcattgcagatgtgagcgttaccaccacagaagagcagcgacgcaccgaatggatggtcaccgagtctctggccgattttctcgacccgcatgatccgggtaaaacggtggaaggttatcctgcgcctaaacgcgcggtgctgattgcgcgcaagccgtaa

SEQ ID NO: 1359 - protein, 323 aa, Escherichia coli
METKKNNSEYIPEFDKSFRHPRYWGAWLGVAAMAGIALTPPKFRDPILARLGRFAGRLGKSSRRRALINLSLCFPERSEAEREAIVDEMFATAPQAMVMMAELAIRGPEKIQPRVDWQGLEIIEEIRRNNEKVIFLVPHGWAVDIPAMLMASQGQKMAAMFHNQGNPVFDYVWNTVRRRFGGRLHARNDGIKPFIQSVRQGYWGYYLPDQDHGPEHSEFVDFFATYKATLPAIGRLMKVCRARVVPLFPIYDGKTHRLTIQVRPPMDDLLEADDHTIARRMNEEVEIFVGPRPEQYTWILKLLKTRKPGEIQPYKRKDLYPIK

SEQ ID NO: 1360 - protein, 440 aa, Escherichia coli [sequence omitted]

SEQ ID NO: 1361 - protein, 310 aa, Escherichia coli
MLHKKTLLFAALSAALWGGATQAADAAVVASLKPVGFIASAIADGVTETEVLLPDGASEHDYSLRPSDVKRLQNADLVVWVGPEMEAFMQKPVSKLPEAKQVTIAQLENVKPLLMKSIHGDDDDHDHAEKSDEDHHHGDFNMHLWLSPEIARATAVAIHGKLVELMPQSRAKLDANLKDFEAQLASTEKQVGNELAPLKGKGYFVFHDAYGYFEKQFGLTPLGHFTVNPEIQPGAQRLHEIRTQLVEQKATCVFAEPQFRPAVVESVARGTSVRMGTLDPLGTNIKLGKTSYSEFLNQLANQYASCLKGD

SEQ ID NO: 1362 - protein, 251 aa, Escherichia coli
MTSLVSLENVSVSFGQRRVLSDVSLELKPGKILTLLGPNGAGKSTLVRVVLGLVTPDEGVIKRNGKLRIGYVPQKLYLDTTLPLTVNRFLRLRPGTHKEDILPALKRVQAGHLINAPMQKLSGGETQRVLLARALLNRPQLLVLDEPTQGVDVNGQVALYDLIDQLRRELDCGVLMVSHDLHLVMAKTDEVLCLNHHICCSGTPEVVSLHPEFISMFGPRGAEQLGIYRHHHNHRHDLQGRIVLRRGNDRS

SEQ ID NO: 1363 - protein, 261 aa, Escherichia coli
MIELLFPGWLAGIMLACAAGPLGSFVVWRRMSYFGDTLAHASLLGVAFGLLLDVNPFYAVIAVTLLLAGGLVWLEKRPQLAIDTLLGIMAHSALSLGLVVVSLMSNIRVDLMAYLFGDLLAVTPEDLISIAIGVVIVVAILFWQWRNLLSMTISPDLAFVDGVKLQRVKLLLMLVTALTIGVAMKFVGALIITSLLIIPAATARRFARTPEQMAGVAVLVGMVAVTGGLTFSAFYDTPAGPSVVLCAALLFIISMMKKQAS

SEQ ID NO: 1364 - protein, 336 aa, Escherichia coli
MIEADRLISAGTTLPEDVADRAIRPKLLEEYVGQPQVRSQMEIFIKAAKLRGDALDHLLIFGPPGLGKTTLANIVANEMGVNLRTTSGPVLEKAGDLAAMLTNLEPHDVLFIDEIHRLSPVVEEVLYPAMEDYQLDIMIGEGPAARSIKIDLPPFTLIGATTRAGSLTSPLRDRFGIVQRLEFYQVPDLQYIVSRSARFMGLEMSDDGALEVARRARGTPRIANRLLRRVRDFAEVKHDGTISADIAAQALDMLNVDAEGFDYMDRKLLLAVIDKFFGGPVGLDNLAAAIGEERETIEDVLEPYLIQQGFLQRTPRGRMATVRAWNHFGITPPEMP

SEQ ID NO: 1365 - protein, 203 aa, Escherichia coli
MIGRLRGIIIEKQPPLVLIEVGGVGYEVHMPMTCFYELPEAGQEAIVFTHFVVREDAQLLYGFNNKQERTLFKELIKTNGVGPKLALAILSGMSAQQFVNAVEREEVGALVKLPGIGKKTAERLIVEMKDRFKGLHGDLFTPAADLVLTSPASPATDDAEQEAVAALVALGYKPQEASRMVSKIARPDASSETLIREALRAAL

SEQ ID NO: 1366 - protein, 200 aa, Escherichia coli
MNINYPAEYEIGDIVFTCISAALFGQISAASNCWSNHVGIIIGHNGEDFLVAESRVPLSTITTLSRFIKRSANQRYAIKRLDAGLTEQQNQRIVEQVPSRLRKIYHTGFKYESSRQFCSKFVFDIYKEALCIPVGEIETFGELLNSNPNAKLTFWKFWFLGSIPWERKTVTPASLWHHPGLVLIHAVGVETPQPELTEAV

SEQ ID NO: 1367 - protein, 173 aa, Escherichia coli
MAIILGIDPGSRVTGYGVIRQVGRQLSYLGSGCIRTKVDDLPSRLKLIYAGVTEIITQFQPDYFAIEQVFMAKNADSALKLGQARGVAIVAAVNQELPVFEYAARQVKQTVVGIGSAEKSQVQHMVRTLLKLPANPQADAADALAIAITHCHVSQNAMQMSESRLNLARGRLR

SEQ ID NO: 1368 - protein, 246 aa, Escherichia coli
MAGHSKWANTRHRKAAQDAKRGKIFTKIIRELVTAAKLGGGDPDANPRLRAAIDKALSNNMTRDTLNRAIARGVGGDDDANMETIIYEGYGPGGTAIMIECLSDNRNRTVAEVRHAFSKCGGNLGTDGSVAYLFSKKGVISFEKGDEDTIMEAALEAGAEDVVTYDDGAIDVYTAWEEMGKVRDALEAAGLKADSAEVSMIPSTKADMDAETAPKLMRLIDMLEDCDDVQEVYHNGEISDEVAATL

SEQ ID NO: 1369 - protein, 147 aa, Escherichia coli
MAYKRPVSILVVIYAQDTKRVLMLQRRDDPDFWQSVTGSVEEGETAPQAAMREVKEEVTIDVVAEQLTLIDCQRTVEFEIFSHLRHRYAPGVTRNTESWFCLALPHERQIVFTEHLAYKWLDASAAAALTKSWSNRQAIEQFVINAA

SEQ ID NO: 1370 - protein, 590 aa, Escherichia coli
MRTEYCGQLRLSHVGQQVTLCGWVNRRRDLGSLIFIDMRDREGIVQVFFDPDRADALKLASELRNEFCIQVTGTVRARDEKNINRDMATGEIEVLASSLTIINRADVLPLDSNHVNTEEARLKYRYLDLRRPEMAQRLKTRAKITSLVRRFMDDHGFLDIETPMLTKATPEGARDYLVPSRVHKGKFYALPQSPQLFKQLLMMSGFDRYYQIVKCFRDEDLRADRQPEFTQIDVETSFMTAPQVREVMEALVRHLWLEVKGVDLGDFPVMTFAEAERRYGSDKPDLRNPMELTDVADLLKSVEFAVFAGPANDPKGRVAALRVPGGASLTRKQIDEYGNFVKIYGAKGLAYIKVNERAKGLEGINSPVAKFLNAEIIEAILERTGAQDGDMIFFGADNKKIVADAMGALRLKVGKDLGLTDESKWAPLWVIDFPMFEDDGEGGLTAMHHPFTSPKDMTAAELKAAPENAVANAYDMVINGYEVGGGSVRIHNGDMQQTVFGILGINEEEQREKFGFLLDALKYGTPPHAGLAFGLDRLTMLLTGTDNIRDVIAFPKTTAAACLMTEAPSFANPTALAELSIQVVKKAENN

SEQ ID NO: 1371 - protein, 188 aa, Escherichia coli
MLELNAKTTALVVIDLQEGILPFAGGPHTADEVVNRAGKLAAKFRASGQPVFLVRVGWSADYAEALKQPVDAPSPAKVLPENWWQHPAALGATDSDIEIIKRQWGAFYGTDLELQLRRRGIDTIVLCGISTNIGVESTARNAWELGFNLVIAEDACSAASAEQHNNSINHIYPRIARVRSVEEILNAL

SEQ ID NO: 1372 - protein, 129 aa, Escherichia coli
MGFPSPAADYVETRISLDQQLISQPAATYFMRASRSHFREGIIQGALLVVDASLTACDGSLLICAIDGEFRIKRYRTHPQPHLVNLDNGRREALPADDDGYSSAPAIFGVITYIINDARNAEFDDCPVM

SEQ ID NO: 1373 - protein, 80 aa, Escherichia coli
MFVELVYDKRNFDGLPGAKDIILGELTKRVHRIFPDADVRVKPMMTLPAINTDASKHEKEQISRTVQEMFEEAEFWLVSE

SEQ ID NO: 1374 - protein, 126 aa, Escherichia coli
MLWRIFIFVNVGLGEAAKRNVGTGENQIPDMSAFPSGNNWFQLPSGHIVQIFSMNVLGADANGTSANYPIAFPTTMIAVSALWSDGTVANAPTYKMMGNTTNRTTLTIKVSASSGTYGTMIIAVGR

SEQ ID NO: 1375 - protein, 147 aa, Escherichia coli
MNKYSYSPSENAFYAVALKNTYELSGTWPADALDIPDDISVKYMAEPPQGKIRVAGENGFPTWAEIPPPSHEELIEQAESERQLLINQANEYMNSKQWPGKAAIGRLKGEELAQYNSWLDYLDALELVDTSGTPDIEWPTPPAVQAR

SEQ ID NO: 1376 - protein, 197 aa, Escherichia coli
MKPVFDENGLAAVPGDMRCFYYDAVTSEYTGWSDEYINTGVSMPACSTGIDPDENIPGRVAVFTGKGWSHEEDHRNETVYSIENGAAVTVDYIGAIKNGYVTLSPLTPYDKWDGEKWVTDTEAQHGASVEAAEAQRQSLIDAAMASISLIQLKLQAGRKLTQAETTRLNAVLDYIDAVTATDTSTAPDVIWPELPEA

SEQ ID NO: 1377 - protein, 310 aa, Escherichia coli
MIYSTGTISINGNTATGSGTNWTAPASQVRAGQTIIVMSNPVQLFQISSVNSATSMTVTPAVSPALSGQKYGILVSDNISVDGLAQAMSQLIKEYDENIGAWETFATTSANQSITVTINGTAVTIPGIGKLAQKGSNGAVTVADGGTGATNAADARTNLGLGEGSPAIGVPFFWPSAAMPNTVIDSWSSMVFLKFNGAKFSATDYPVLAKVFPSLVLPEARGDFIRVWDDGRGADGGRELLSWQEATNFSQFAGNIGGGAGHAINFHDGIAGNQPGFSRFNFNSNSVGDGVNFVAVRPRNIAFNFLVRAK

SEQ ID NO: 1378 - protein, 1308 aa, Escherichia coli
MGEKMQLLKQETILQGAKGGGGSSHTPVEQPDDLLSVAKLKMLIAVSEGEIQGDLTAQNIFLNDTPLANDSGEYNFSGVKWEFRKGTQDQTYIAGMPQVDNELAVGTTVTTTAPWTRQFTNLSLDAIRIKLSLPVQYLYKDNGDMVGTVTEYAIDLSTDGGAWKTVVNGKFDGKTTTEYQRDHRIDLPKSTSGWSVRVRRITADASGSNSKLVNAFKVFSYAEVIDSKLRYPLTALLYVEVDSSQFNGSAPKVTCKIKGKLIKVPDNYDPKTRTYSGSWSGGFKMAWSNNPAWIFYDLVLDEIYGMGTRVDASMVDKWALYSIAQYCDEMVSDGAGGTEPRFTCNVFIQSQEDAWQVLNDLAAVFRGITFWGNDQIYVQADVPQDDVDWVYNVSNVIDGLFTYAGGSYKNRYSSCLVSWSDPQNHYSDTVEGVYDSALVERYDVRQTSLTAIGCTSQSEAHRRGRWVLLSNAKDGTVSFGVGLDGYIPLPAEIIGVADPFRSGKENGGRISAANGRQITLDREIDYAAKDRLVVNLPDGKAQTRTISAVSADKKTVTVATAFSQVPVAGAVWAIDSDNLAIQYFRVTSIAANDDSTGGFTITAVQHDPNKYRYIDDGVRVESPPITVTPISVLSAPKNIVVTESDHVSQGLTVASLDVSWDKVEGAIRYVAQWRKDNGDWINVPVTSAQGFSVQGIYSGSYDVRVRALNAQDTSSPWGYGETTYLSGKTGKPGTPLNFLATEDVVWHIDLTWKFPDGSGDTAYTEIQRATTADYANPELLVLVPYPAADYQHGPMPAGVRQWYRARLIDRIGNAGDWTDWIMGTSSIDVSEITNDILEDMKESETFKDLIENAVDSNEKIAGMANDIKQANDELEQQAKDIAKNAQDVGKVQTSVNELSSTVGNVSSSLSQLEQTVATADTALGQRIDNISVSMDGMTGGVKNSAIAIIQANLAQVATRKTLSASVAGNSANLDRLDEVIVSEKEATARSLLSLQTDVNGNKASINSLNQTLSDYQQATATQINGITATVNGHTSAITTNAQAIANVNGELSAMYNIKVGVSSNGQYYAAGMGIGVENTPSGMQSQVIFLADRFAVTTAAGNSVALPFVIQNGQTFIRASFIQDGTIENAKIGNYIQSNNYAAGSAGWKLNKAGDAEFNNVTVRGVVYASGGSFTGEIQATSGKFKGTVEAQSFIGDIANMHTGTNVSRSSDGYLEKVMTYNDSSSSGHARHVCVIANVKGNGAGTIDINGNESGSSVQDMERLIMHSAVVTGPNVTVRIKVSAQNNRGASISSPTIIVSHGSGSFTG

SEQ ID NO: 1379 - protein, 205 aa, Escherichia coli
MVKTLILEGKMAKKFGKRVQFDVADLREMLRAMCSQVPGFKKYMSEAHMKGIRFAFFNGGNNIGLEEFDMTRGGSVYRIVPVYEGAKSSGVLQIVVGAVALVAAFFTAGASMAAWGAAMSATAISATSILTGVGVSMMLGGVVQMLTPQPSFGAGKSSSTDNTPNYAFGAPVNTVAMGHPVPLAYGLTEAGGAIVSAGMYSSDQQ

SEQ ID NO: 1380 - protein, 239 aa, Escherichia coli
MREKLLDAIRQHVAAEYPKEACGLIVQSGQQQIFIPCRNIADKPEETFTLSPEDQLAARARGEIIMLIHSHPDVVRLVPSELDRIQCDWSGIEWGIMSWPDGDFCTISPREDRDYAGRQWVLGYADCWSLIREFYLREYGIVLGNYSVPYEWWESGKERLYDDNWEREGFVEIAAGAMQPGDIIMMSVQASVTNHAAVYVGDNIILHHLFGHLSSRTPYGKYYRDRTVRVVRHKDRMHG

SEQ ID NO: 1381 - protein, 245 aa, Escherichia coli
MSFTADIQQLEPGSVIQLIEIDGTEFGMDQVLRFHAHNIQEEGWAAFAAENLPAIIWQGNQYDPHPYELKGMELSSTGSQPTPTLSVGNVGNYVTALCLEYDDMVRAKVKIHTTLSKYLDAANWKNGNPGASPADERLQLFYVNAKTAETRVQVDFELCSPFDIQSLQLPTRQITPVCTWCMRGWYRSGTGCDYNGTKYFTKDGTPTDDPSKDVCGGRRQDCQDRHGPDAPLPFGGFPAANLQGK

SEQ ID NO: 1382 - protein, 112 aa, Escherichia coli
MTDTFTWRTRKTAQGTETARTLQAQFGDGYKQIAGMGINDKQETWNLDWTGTRQEAAALRAFLMSHVTKSFWWTTPWGEKKLFRMKADSFSVSFPTGKKATVAFTFEQAFAP

SEQ ID NO: 1383 - protein, 1045 aa, Escherichia coli
MAQQISDLVINLDVDSATFSEQVARIKGQLTGMAEDSEKVQTRMQRASERQAAAFKTVGDAGAAAAADMKSRQSAATEGLTKDWQNVSKSVDETHRRVTELNQRMRENDGQAAALARRQDELAASFFRQIDGVRQLNGETQSLANVQARFRAARAQGNITQQDYLALISRTTARQKELQIVEEKSAAARTRFLSQLKQQVAEQKLSGTELLRMKAAQVGASDAAEVYIRKLEAAKVATHGLGLQSAAARQELGILIGEVMRGNFGALRGSGITLANRAGWIDQLLSLRGLGIASMVGGIAAAVFGLGKAWYDGSKESEEFNRQLILTGNYAGKTSGQLQALARSLAGNGITQHAAAGVLAQVVGSGAFSGNDVSMVSNVAARLQQATGQAVDETINQFKRLKDDPVNAVATLNDSLHFLTATQYEQIASAQALGDSQKAAELAMRAYSDAVIQRAGAVEDNLGSLEKAWNWVKNAASGAWDAMLGVGRNPDTAMKRQDSFAEWQAAEKEYRALSSNLKVDPDYAGNNVLQKADAERLRNARQQVELKKQAYDLADQQYAQEGLAAAREKMRTDQQAQAIRSQQQFNQLVESGATAAEKRASAEKKLSQLIEKNRQDAKDGVATLWTEKDIAAARAGIEKQWKDPKTPKGKSYSTPAGDKAEEKAQAELLTLQAQLKTLEQHTSVNDVISKQRQDLWQTENQFTVLQEAAGRRQLTAQEKSLLAHKEETLEYKRQLADLGDKVASQQKLNQLADQAVKFEQQQKAARAGLQAQSEGLSTREAGRQTTLQRLSESYSYNPQAQQKVLEEQRATFEAEDALRANWLAGAKQGWAEYQDSATNVFSSVQQISQATFSGLAGQLTSLTTTGKASFREFTSSILKMIVSVINQLLVAYTIQSAMGWVSGGAKTSSAGQSFAVPSYRPQGFDVGGFTGHGGKYEPAGIVHRGEFVFTKESTSRIGVANLYRLMRGYASGGLVGGGNAAGAGMGGISVYAPVSISQQGSDGSINQANATGTAKQLQAIVQQTITERLKKEMSAGGVLYSRRTQ

SEQ ID NO: 1384 - protein, 90 aa, Escherichia coli
MLAGMTSTELGDWHQFYREHYFQDAQLDAHFSELLYSISTLFFRDPELTPAHFSLLSPSGIVISDDEPDDDALMAAAEGITGGIRYGPAD

SEQ ID NO: 1385 - protein, 143 aa, Escherichia coli
MFLKKEKFTWQKESLTIFELSALQRIEYITFMAAEEKAVSADSDGISDQEMTARLIGSNIRCGARLIAMSLWHNDPAGTDVETLYQQVLSGWPPEAIGKAEMEIKLLSGMLVPVEDDKAADPDAPAEAESAEPVAAEKPLPAS

SEQ ID NO: 1386 - protein, 247 aa, Escherichia coli
MPTPNPLAPVKGAGTTLWLYTGTGNAFANPLSDIDWNRLAKIKELTPGEMTAESYDDTYLDDEDADWNATAQGAKSAGDTSFTLAWKPGEEGQKDLVAWFIDGSVRYYKIKYPNGTVDVFRGWCSSLGKAIPAKEVITRTAKITNTGKPELAEESGTPNIPVTGVTLDKATASVAVGATTTLNVTVNPASASDTSFRVATSDGAKATVTVSGNAITVTGVAAGTADVIVMTSDGNFVAVCKVTVTAA

SEQ ID NO: 1387 - protein, 133 aa, Escherichia coli
MNRHSAIRAAILAKLKAEITDTVTWFDGRPVFLEEQDLPAVAVYLSDAEYTGDSLDEDSWQAVVHIEVFLKASSPDSALDSWMEEKVYPAMAFIPGLTELVETFTPQGYDYQRDDEMATWGSVDFTYLITYSI

SEQ ID NO: 1388 - protein, 190 aa, Escherichia coli
MKGLERAIQNLNSLSRLIVPEATAKALNRVARRTISQGSKAVAKEATVDDNRKKGLPVRLVRQRSRLRKARHDRPVASIKINRGNLPAIKLGTARVRLSRKKGARNGAGSVLKIGPYTFRNAFIQQLANGRWQVMRRVGQARYPIDVVKVPLETPLTVAFTAISKRLIESDMPKELSAALKNQLRIHLKR

SEQ ID NO: 1389 - protein, 80 aa, Escherichia coli
MDAATIKKMGKTAIINGSSYDVVPAEQLEEMGPLSGTGTSLVVFSELYQPRRNDSVDYDGKNLIVTRYDMFNGKPRIHLE

SEQ ID NO: 1390 - protein, 108 aa, Escherichia coli
MAKNYAQDGKTIPLVNSGATDVHSGDPVVVGKLIAVAITDIPAGDTGDGFTEGVFLLPKVSADAVTAGAQVYLKDGKITIEETDAVAAGIAWEDAGANTTVVEVKINA

SEQ ID NO: 1391 - protein, 648 aa, Escherichia coli
MQASNNSEADIFIYDEIGYWGVTAKQFVNDLRALGDVTHINLYINSPGGDVFDGIAIYNALKHHGAAITVHIDGLAASMASVIAMVGNPVIMPENTMMMIHKPWGFAGGDASDMRDYADLLDKVESVLIPAYAQKTGKSTEEIAVMLEDETWMNGSECLELGFADQVTPSLQAMACIHSKRIEEFEKMPKSIRNMITPPRNTTQRDPVITQPQAPQAKTDPAPDENAIRAQVLAEQKTRVNAIGDLFAMFGNKHMELQNQCVADPDCSVDKAKDLLLAELGKTATPSNKTTQPHIHAGNGNFVADGIRQALMARAGFEGQERDNVYNGMTLREYARMALTEKGIGVASYNPMQMVGLALTHSTSDFGNILLDVANKALIQGWDEAQETFEQWTKKGQLSDFKTAHRVGMGGFPSLRQVREGAEYKYITTSDKGETIALATYGEIFSVTRQAIINDDLNQLTDVPMKMGRAAKATIGDLVYAILTKNPKLSDGKALFHADHKNLSSGAISVASLDESRKLMRLQKEGERTLNIRPAYMLVPVALETLANQTIKSASVKGADINAGIVNPIQNFAEVIAEPRLDEADAKAWYLAAAKGTDTIEVAYLNGVDTPYIDQQEGFTTDGIATKVRIDAGVAPLDYRGMTKSSGQ

SEQ ID NO: 1392 - protein, 499 aa, Escherichia coli
MSFLDDAIGLFSPGWKASRLRARAVIKAYEAVKQTRTHKAQKENRSADQLSQMGAVSLRQQARWLDNNHDLVIGVFDKLEERVVGAKGIIVEPHPMLSNGKIAKKLATDIRRKWGEWSVRPDVTTQFTRPMLERLMLRTWLRDGEVFAQLVRGTGNGLQPVAGVPFWLEALEPDFVPMNSDAATQLNQGVFVDNWGRPKKYQVYKSLPVSGRQFDTKEIDAENMLHLKFTRRLHQTRGTSLLSGVLMRLSALKEYEDSELTAARIAAALGMYIKKGDGQSFDSDSSSDDRELMIQPGMLYDELQAGEEIGMIKSDRPNPNLESFRNGQLRAVSAGSRLSFSSTSRNYNGTYSAQRQELVESTDGYLILQDWFIGSVTRPMYRAWLKMAIAAGEIKLPRGIDMDSLYNAVYSGPVMPWIDPVKEANAWKTQIRGGAATESDWIRASGRNPDDVKSRRKAEVDENREQGLVFDTDPANDKGGTSAEAKEPGAPPSESQRKK

SEQ ID NO: 1393 - protein, 71 aa, Escherichia coli
MNPADIQNMIDRYAAAELSVLEGKSITFNGQQMTLENLSEIRKGRQEWERRLATLNNKRRGRPGYRLARFG

SEQ ID NO: 1394 - protein, 700 aa, Escherichia coli
MAKRASARDIRRDVSGILRAPRRMPVADAVSTYMRVPMGAGNSVPWDPDLAPYVIEPMNCLASREYDAVVFVGPARTGKTIGLIDGWIVYNIVCDPADMLVIQVSEEKAREHSKKRLDRTFRCSPEVKTRLSPRRNDNNVYDRTFRAGNYLKLGWPSVNIMSSSDYKSVALTDYDRFPEDIDGEGDAFSLASKRTTTFMSSGMTLVESSPGRDIRDTKWRRSTPHEAPPTTGILSLYNRGDRRRLYWPCPHCGEYFQPEMDNMTGYRDSSDPVLASEAAFLQCPACKGRITPDMKRALNMKCVWLRDGQTIDRKGLVSGDGRRSRIASFWMEGPAAAYQTWAQLIYKFLTAEQEYESTRSEETLKTVINTDFGRPYLPRASMEQRKSELLEQRAEDVPKRSVPNGVQFLTATVDVQAGRNRRFVVQITGYGSMGERWIVDRYNIRHSLRCDGNGESIQVDPASYPEDWDLLLTDVFDKTWPLAADPSKGMRLMSMAVDSGGEDGVTDNAYKFWRRCRREGLGKRIYLFKGDSVRRSKLIQRTFPDNTGRSTRRAQATGDVPLYLLQTDALKDRVNNALWRDSPGPGYVHFPAWLGSWFYDELTYEERSNEGKWSKPGRGANEAFDLLVYADALAILSGYEKIKWPSAPEWARRETWIEDTQTEAGEMPSPPPAPKSKPKPKREKPVTEQANPWSSSGGWV

SEQ ID NO: 1395 - protein, 162 aa, Escherichia coli
MDQEIATLKLNINQLAGITGVHRQTVAARLKNVEPAPGSNSKLKLYLVTDILTELMIPTVSANIDDMPPSDRLSHWKAENERLKFEQDTGQLIPADEVAREFSLMAKAVVMVLETLPDVLERDCALTPAAVVRVQSVIDDLRDQMAEKVQDAGKEEEQPEED

SEQ ID NO: 1396 - protein, 242 aa, Escherichia coli
MSNKIITLSGAANEVLYALFFRGALLSGDLPSKSGTAELRELGFAETRHTATEYQKENHFTFLTSEGQKFAVEHLVNTRFGEQQYCASMTLGVEIDTSAAQKAIDELDQRIRDTVSFELIRNGVSFIKDAAIANGAIHAAAIETPQPVTNIYNISLGIQRDEPAQNKVTVSADKFKVKPGVDTNIETLIENALKNAAECAALDVTKQMAADKKAMDELASYVRTAIMMECFPGGVIWQQCRR

SEQ ID NO: 1397 - protein, 76 aa, Escherichia coli
MKILAFINPPGSYMQIETKEMVIFLRDDGISLQYPDGQCAGYGIDGNMLIFMGQSCELFPTKIILHDQRTTNFTHK

SEQ ID NO: 1398 - protein, 198 aa, Escherichia coli
MDYYHEIDFPSLFARAVESDDDVGTTLRIHLLCERMVEAWICACCDCQDLFGRDKNKLLIECNTKISMAGNLGIPPELMKSLKTINSMRNDLAHNPSIQSIADSRIQSLKDTLTEYFKQHPTEPSMEESKLGIFNAENQLTEEVSLDSDSSKNRLKLILLFSKLMQALMQLVAANHNGRWDNQFSQFVYHVTMNATKR

SEQ ID NO: 1399 - protein, 65 aa, Escherichia coli
MTVVLTAKQIEDLAAFAKEDGQPQYTITTGTIPEFEADNGEIIPGYTGLIAYSESLDHGVLQLDD

SEQ ID NO: 1400 - protein, 159 aa, Escherichia coli
MVIVALVGSFLAGSEWTNRSWKIKWADRDSAESSQEANAQTAARMIEQGRTIARDEAVKDAQAQAASAAVTSAGLATTVKQLRAEATKLATHMDAAKHTADLATSVRSKTAGANAAMLADMLGSLAEAARYYAGRSDESYRAGMTCERIYESVRLSNNQ

SEQ ID NO: 1401 - protein, 182 aa, Escherichia coli
MAMSLKLKNKLSAAVVGLILAGASAPVILDQFLDEKEGNSLTAYRDGGGLWTICRGATMVDGKPVVQGMKLSAEKCAQVNAIERDKALAWVDRNIKVPLTEPQKAGIASFCPYNIGPGKCFPSTFYKRINAGDTKGACEAIRWWIKDGGRDCRLTKGQKDGCYGQVERRDQESALTCWGIDQ

SEQ ID NO: 1402 - protein, 92 aa, Escherichia coli
MTRMSTIYSRLSYGSGTTLAGCGVSAKAYAETAKTAKEVSWMLADRIAGLSLSDWAIIVGIACTVITCAVNWYFRWKEREDRRNGYVSKAEE

SEQ ID NO: 1403 - protein, 350 aa, Escherichia coli
MKNTVKINSVELINADSLHYVATLPDNSIDLIVTDPPYFKVKPNGWDNQWKGDEDYLRWLDSCLAEYARVLKPAGSIYLFCGHRLASDIEIMMRARFNVLNHIIWAKPSGRWNGCNKESLRAYFPSTERILFAEHYLGPYTGKEDVYERKSTELKQHIMTPLIDYFRNARESLGVSSKEIAEATGKKNMASHWFGASQWQLPNEVDYRKLQELFTRIAIDKHIQQKLEHPHHQLVATYQSLNRKYSELLEEYKILRRCFSVSALVPYTDVWTHKPVQFYPGKHPCEKPADMLKQIISASSRPGDIVADFFMGSGSTVKAAIELGRRAIGVELEADRFIQTTEEVEKLKKS

SEQ ID NO: 1404 - protein, 63 aa, Escherichia coli
MLNQEDMTETAKAVFNELSDKPATAGEIAQNTHLSHERCQLILTQLVMAGLSDYQFGCYKRLQ

SEQ ID NO: 1405 - protein, 299 aa, Escherichia coli
MPNWIDVLGEMGTIAQRTPADEVRHKYLRDLSKHTGRNVISYYSGFLQKGGPGFQHLIQMSDDDKNGLMSAINGLDTSLGLDILLHTPGGDIAALESIGHYLRSKFGTNIRAIVPMISMSCGTMLACCAEQIVLGKQSNLGPIDPQFNGLSSHAIIEEYERAKAEIFANPAALQWWQFTFQKLNPTLIGECEKAILWANEIVQKWLCTGMFAGQADAEAKAKRICDELNNHQATYAHARHIHLDKAQNIGLNIMELESDQTLQDLVLTIHHCYMHSFGTSPAAKIIENHNGSTMMWNIC

SEQ ID NO: 1406 - protein, 68 aa, Escherichia coli
MSAAEFYEKMGIQPQEFQKGESVQHFAMRVLAQQNDLNVRSGVLYSYSTVTPNTTEQNGQQSHQLYSY

SEQ ID NO: 1407 - protein, 229 aa, Escherichia coli
MNQQDLNFVRIELRRALPDLSGGTKGQLEAFSEHPPADKNATPRRGIHLVELEGEKGPRFVNSLSAPLYVLETRSRRRPMPPIKDAEFESAPWRRAVSALSGYQQAWLRYCYGFDLSYKHQVMMCEYVWKTYQKCLGDNSLQERVVKKLIGLVWLAGQEIAATRNNETYKDYAGAALARMVSVDRSTWLRVYSGHWAGLKAAFTQLDESALAMALEYYEEEEALKVAEM

SEQ ID NO: 1408 - protein, 331 aa, Escherichia coli
MRALLTPEIAHRMGIVLFRPGAELMHLFMRGRVLLEPEPEEMASFSTGAVPAAIQPLADDPVMRQVFENDRVIQRAGGLPSLEQWLSNRFECQWPHSSWHDKNFTTMRHPPGSIRLCWHCDHTLSGQHTEQLAGIAAGNLVSWILEVIRRDSGFPESHILTLPELCWWMVRNDLADVIPESVAHKGLRLPDDKIRSVMRESDIVPSASATSLVQEKAKKILTLSVDPESPESFMLRPKRRRWINETYTRWVKTQPCECCRRPADDPHHIVGHGMGGTATKAHDLFVIPLCRECHDELHADVPAFEQKHGTQLELLLRFMDRALAIGVIAKA

SEQ ID NO: 1409 - protein, 227 aa, Escherichia coli
MSQLATTALTMSSSDIAELVESRHDHVKRSIERLAERGVIELPPMGEVKNHLNQSVSVYLIGKRDSYIVVAQLSPEFTARLVDRWQELEQAQQQTIPQSFSEALRLAADLAEQKQQLTNELAAAAPKVAFVDRYCTASGSMSFRQVAKLLKAKEPDLRLFLLENDIMYRLGGTMTPRHQHIDAGRFEVKTGTSVTSNHAFSQARFTAKGVRWIGGLWAEHIARGQVA

SEQ ID NO: 1410 - protein, 128 aa, Escherichia coli
MKLILPFPPSVNTYWRAPNKGPLAGRHLISAAGRKYQSAACVAIIEQLRRLPKPSTELAAVEITLYPPDARRRDIDNYNKALFDALTHAGVWEDDSQIKRMLVEWGPVVPKGRVEITISRYEPAGAAA

SEQ ID NO: 1411 - protein, 439 aa, Escherichia coli
MMTNKYCQALAALRSKPAHELKEVGDQWRTPDLLFWGINALFGPLVLDLFADDDNAKCPAWYTAEDNALTQDWSERLAELGGAGYGNPPYSRSQYHEKQAITGMTHIMNYAAAQREKGGRYVFLIKAAPSETWWPEDADHIVFIRGRIGFDLPVWFVPADEKQKPTSAFFAGAIAVFDKSWRGERFSYINRTELEAKGRAFMALAQFAASKSQPVTATPPAADKPEAELPLTQKDIFAISGVEAWACVRAAFGDKEEYTFSESKFGHTWAADSVEAPEFTQVSPLTIDKAKLLIRESILFGVDEWLLSIEFDDAAVRLDMSERIRTVALEASGEYGMNSTDFIAAMGSLDVSSWSNIRQIRMHIREKAKPVSDPLPESRIWPLEVRIVFDQVDGADMLDESLQHKLKANINQLWLERTATSEIITAASELVRNMRGEAA

SEQ ID NO: 1412 - protein, 293 aa, Escherichia coli
MSTKLTGYVWDACASSGMKLSSVAIMARLADFSSDEGVSWPSIGTIARQIGAGESTVRTALAQLEKDGWLSRKQRRNGNRNASNVYQLNVVKLREAAFSHLSESDASKSDPSKSDASKSDPSKFEASKSSKKGGFDPSESGGDPSVKSKQEPQVTSKPSCPVAAQPDPEVVITDQARQVLSYLNQTTGSRYQVCSTSLENIRARLREQFTVDDLCLVVDYKNADWRDSEQAQYLRPATLFIPKNFPGYLQSATKWSSAGRPERVNGKWETNSASRANFQSVDYSLPENSGFRS

SEQ ID NO: 1413 - protein, 112 aa, Escherichia coli
MNSVNRFRPAKQFRCLPLVGKDAQFGYVEIINNAADGGNYQPADLMVEAFVQMNEKGREEWLKLTGGSEITTEFPSELSAGSQIHSALYTFAKGTIMSASALLNNSSVNLQN

SEQ ID NO: 1414 - protein, 187 aa, Escherichia coli
MVDSINTAIRLMCKAHKHGRLGMASDLGMTIDQFHNHLYQKCGSRFFTLAELERMEDLSGSCYLAEYQANRKGKWLVDVPTAESLDNVELYSIEMKAAAASGELANAKMAAAADGVIDSSERKMLSELFSKKLRHQIHGFLGFMALYGVGVSDQAIDVFVSTGRKGDARECAAPGALACRISGETNA

SEQ ID NO: 1415 - protein, 85 aa, Escherichia coli
MSSQHKNVTAKAVKAIGSISEVSRRFEFQSVQSVANWIAKNRVPSERVIQLCQWGGWVVTPHQLRPDIYPNKNDGIPSANNNSQL

SEQ ID NO: 1416 - protein, 236 aa, Escherichia coli
MPCALNLLLMVENAKYKDFAERLNRSLQEQSIGVKELSEFSGVSYEMARRYTLGTAKPRDEKMIRIAERLAVSPAYLDYGVPVNGGDAPAKGTVRIEQLDVHASAGSGYINQPFPTIVSSIEIPEERIFELFGRRSLDGIVMINVDGDSMMPTLCPKDLLFIDSKVEQFSGDGVYVFNFEDSTFVKRLQKVKGRRLAVLSDNEHYPPFFIEEHEMNELYIFGKLIRCLPLKMIEFG

SEQ ID NO: 1417 - protein, 65 aa, Escherichia coli
MGAFDNQEITLPACPKCGTKTKKKIAWLKSNKSFTCRCGATINVNSSQLTSEIRKVEDKLKKLFK

SEQ ID NO: 1418 - protein, 305 aa, Escherichia coli
MNNPFFKNMLVYRISRDFTINQEELEQQLELFRFTPCGSQDMAKTGWVSPLGQLSDRLHHTVNNQVLLVIRREEKILPSPVITEELRKRVSRLESDQGRRLKKTEKDSLRDEVLHSLLPRAFSKNSTVGLWINVTDGLIMVDAASAKRAEDSLALLRKTLGSLPVVPLTMETPIELTMTDWVRSGSAPAGFGLGDEAELKAILEDGGIGRFKKQTLVSDEIHVHLEAGKVVTKLSIDWQQRIQFVLCDDGSIKRLKFSNEITEQNDDIDREDAAQRFDADFVLMTGELISLINGLTTSLGGEAKR

SEQ ID NO: 1419 - protein, 179 aa, Escherichia coli
MSYIQTLSGKHFNYLDIQQDDIVIEDIATALSHICRFAGHLPEFYSVGQHSVLTSHLVPQEFALEALLHDAAEAYLQDIPSPLKRLLPDYQAIEARVDAAIRQKFGLPTEQHPTVKYADLVMLASERRDFEIDEGSIWPCLEGVVPTDLFIINPVRPGQSYGMFINRFNELMEQRQCAA

SEQ ID NO: 1420 - protein, 84 aa, Escherichia coli
MTVFEYLQAHPNTTSGEIAKGMNKKTPAVAGALSQLYGTGRIVKSGVRKGIPTYRINDMPFGCSNSLTMMFNQLLSRARQGAAQ

SEQ ID NO: 1421 - protein, 115 aa, Escherichia coli
MTALNKQALREEFQFMQDNYSDPADHDRQVIYIEAEALLDELEAKDSTIAAQQHEIRMLLNALEEKPCPKCNDTGMTDSGGTQPWGEPIEIECDCRQQDANTAELVAAGIGVKGE

SEQ ID NO: 1422 - protein, 102 aa, Escherichia coli
MDKLIKPTAKGKYDGSCDYLCSEDARFIVMRGDYTEAEIIQASVSQDVIDSDGAADFASSARYYQCWYKVSPIGGQDGYSGWHHPRDSPCRGAYFASVLQWD

SEQ ID NO: 1423 - protein, 155 aa, Escherichia coli
MTTNNHPAHGPVSLDRLHQIREHLLHDTQYSNGGNRAYILADVLKVIDGAIARELVRREHAAWSQATFGDVGPVGPLKHLSKEALEAAAEPGDLSEWADMQFLLWDAQRRAGISDEQITQAMIKKLAINKVRQWPEPKDGEPRLHIKEQSEQEKK

SEQ ID NO: 1424 - protein, 84 aa, Escherichia coli
MFSLIRRGQIYTDSSNWPVIIHSCSDHSVRIKRNDGELRTISIKRFNEDFERVEHDEYRKICAEIEQETNLKNLRAMRRGKITE

SEQ ID NO: 1425 - protein, 189 aa, Escherichia coli
MNNLMIDLESMGKKPNAPIVSIGAVFFDPQSGELGQEFYTAVNLESAMEQGAVPDGDTILWWLRQSSEARSAICVDDAMPISSALSELSHFINRHSDNPKYLKVWGNGATFDNVILRGAYERAGQVCPWQFWNDHDVRTIVTLGRSVGFDPKRDMPFDGVAHNALADARHQAKYVSAIWQKLIPTTSNS

SEQ ID NO: 1426 - protein, 78 aa, Escherichia coli
MSNIFQLAPNDWVCESVLIAVTGLKPGTILRARKECWMIGREYIHVSPDGNPKPSSECMYNRKAVDAWVASMKSKQPG

SEQ ID NO: 1427 - protein, 437 aa, Escherichia coli
MDKVTYPTGVENHGGTLRIWFNFKGKRVRESLGVPDTAKNRKIAGELRTSVCFAIRTGTFDYATQFPDSPNLKAFGVSKKDITVKELEEKWLDLKRMEICANAFNRYESVARNMVPRIGGNRLVSAVTKEELLYLRKYLLTGYQNPTKNKAPAKGRSVVTVNYYMTTMAGMFQFAADHGYLEVNPFEGIKPLKKARAEPDPLSRDEFIRLIDACRHQQTKNLWSLAVYTGMRHGELVSLAWEDIDLKAGTITVRRNYTKLGEFTLPKTEASTDRVVHLIQPAISILKNQAEMTRLGRQYHIEVQLREYGRSVNHECTFVFNPHVVRRSKQVGFIYRVDSVGDSWEAALKRAGIRHRKAYQSRHTYACWSLSAGANPSFIASQMGHASAQMVFNVYGAWMADSSAEQIAMLNQKLADFAPLMPHSHENSTGGLLKSVS

SEQ ID NO: 1428 - protein, 241 aa, Escherichia coli
MEGNTTLYALPKPEVVLRWREQTTDDFRFCFKFPATISHQAALRHCDDLVTEFLTRMSPLAPRIGQYWLQLPATFGPRELPALWHFLDSLPGEFNYGVEVRHPQFFAKGEEEQTLNRGLHQRGVNRVILDSRPVHAARPYSEAIRDAQRKKPKVPVHAVLTAKNPLIRFIGSDDMTQNRELFQVWLQKLAQWHQTTTPYLFLHTPDIAQAPELVHTLWEDLRKTLPEIGAVPAIPQQSSLF

SEQ ID NO: 1429 - protein, 131 aa, Escherichia coli
MVSALYAVLSALLLMKFSFDVVRLRMQYRVAYGDGGFSELQSAIRIHGNAVEYIPIAIVLMLFMEMNGAETWMVHICGIVLLAGRLMHYYGFHHRLFRWRRSGMSATWCALLLMVLANLWYMPWELVFSLR

SEQ ID NO: 1430 - protein, 247 aa, Escherichia coli
MSHRDTLFSAPIARLGDWTFDERVAEVFPDMIQRSVPGYSNIISMIGMLAERFVQPGTQVYDLGCSLGAATLSVRRNIHHDNCKIIAIDNSPAMIERCRRHIDAYKAPTPVDVIEGDIRDIAIENASMVVLNFTLQFLEPSERQALLDKIYQGLNPGGALVLSEKFSFEDAKVGELLFNMHHDFKRANGYSELEISQKRSMLENVMLTDSVETHKARLHKAGFEHSELWFQCFNFGSLVALKAEDAA

SEQ ID NO: 1431 - protein, 323 aa, Escherichia coli
MIDFGNFYSLIAKNHLSHWLETLPAQIANWQREQQHGLFKQWSNAVEFLPEIKPYRLDLLHSVTAESEEPLSAGQIKRIETLMRNLMPWRKGPFSLYGVNIDTEWRSDWKWDRVMPHLSDLTGRTILDVGCGSGYHMWRMIGAGAHLAVGIDPTQLFLCQFEAVRKLLGNDQRAHLLPLGIEQLPALKAFDTVFSMGVLYHRRSPLEHLWQLKDQLVNEGELVLETLVIDGDENTVLVPGDRYAQMRNVYFIPSALALKNWLKKCGFVDIRIADVSVTTTEEQRRTEWMVTESLADFLDPHDPGKTVEGYPAPKRAVLIARKP

SEQ ID NO: 1432 - DNA, 9687 bp, Escherichia coli
aatcgccggtgtactccgcgtcagaaaggtatacagccacggcagggagatcctgctcttcaagaaaaacagggcgcccgtcaaaccaggtgaccgtgtcggtgatctcggctttcagtttggccagaatggctgcacgaattgcgctgtgtctgttcatcgcttcaggtggatcctcagttggtttttcagggctgcggaaagttctttgggcatatcgctttcaataaggcgctttgaaatagcggtgaaggccacggtgagcggtgtctcaagaggaactttgaccacatcaatcggataacgggcctgacctacgcgccgcatgacctgccagcgcccgttcgcaagctgttggataaaagcgttacgaaaggtatagggcccgattttaaggacgctgcccgctccgtttctggccccttttttacgcgagagcctgacgcgcgccgtgccgagctttatcgcaggaagattaccgcggttgatttttatcgacgcgaccgggcgatcgtgacgggccttgcgcagacgggaacgctggcggaccagacgaaccggaagcccctttttccggttatcatcaactgttgcttctttcgctacagctttgctcccctggcttatcgttcttctggccaccctgttaagtgcttttgcggttgcctcaggaacgattaaccggctgaggctgttcaggttctgaatagccctttccagtcctttcacagacatagcgcctcctcattcgagatggatgcggggttttccgttgaacatgtcatagcgggtaacgatcaggttcttaccgtcgtagtcgacgctgtcgtttcggcgtggctggtaaagctcagagaaaaccaccagcgaagtacctgttcccgacaatggccccatttcctcgagttgctcggcgggaacaacgtcatagctgctgccattgatgatcgctgtctttcccatcttttttatagtggccgcgtccatgcgcgccgccatccggtcaaaggagttaggcattgatcttaacttcaacaacggtggtgtttgcccctgcatcttcccaggcgatgcccgcggcaacggcgtccgtttcttcgatcgtgattttgccgtccttcagatacacctgcgccccggcagtaaccgcatctgcggatacttttggcaggaggaaaacaccctcagtaaaaccgtccccggtatcgccagccgggatatcggtaattgccaccgcgataagttttccaacaacaaccgggtcgccgctgtgaacatcggttgcaccactgtttaccagagggatcgttttcccgtcctgcgcatagttcttagccataacttctccattcagcccctttcgaggctggtttcaggtataaaaaaagcccttacgggcgtctgtttgtcaggactgttttttactgaccagaggatttggtcatgccgcgatagtccagcggcgccacgccagcatcaatacgcactttcgtggcgataccatcagtggtgaagccttcctgctgatcgatgtatggcgtgtcgacgccgttgagataagcgacctcaatggtgtcggtgcccttcgcggcagccagataccaggctttcgcatcagcttcatccagacgtggttcggcaatgacttctgcaaagttctggatagggttaacgatcccggcattgatgtctgcacctttaacactggccgacttgatggtctgatttgccagagtttccagggcgacgggcaccagcatgtaggccggacggatattcagggttcgctccccctccttctgcagacgcatcagcttgcgcgattcgtccaggctggccacagaaattgcacccgagctcaggttcttgtgatcggcatggaacagcgcctttccgtctgagagtttcgggtttttggtcagaatggcgtaaaccagatcgccaatcgttgctttcgccgcgcgccccatcttcatcggtacgtcggtaagctggttcagatcgtcgttgatgatcgcctggcgagttactgagaagatttcaccatacgtggcaagcgcgatggtttcgcctttgtcactggtagtgatgtacttgtactcagccccttcgcgaacctgtcgcagagaagggaacccacccataccgacacgatgcgccgttttgaagtccgacagctggccttttttggtccactgctcgaaggtttcctgcgcctcgtcccagccctgaatcagcgctttgttcgcaacatcaagcagaatgttgccaaagtcagaggtgctgtgggtcagcgccaggccaaccatctgcatcgggttgtagctggccacgccgatacctttttctgtcagggccatacgcgcatactcgcgcagcgtcataccgttataaacgttatcccgctcctgaccttcgaacccggcacgcgccatcagtgcctggcgaataccatccgcgacgaagttaccgttgcccgcatgaatatgcggctgagtggttttattggacggcgtggccgttttaccgagttctgccagcagcaaatctttcgccttatcgacggagcaatcagggtcggccacacactgattctgcagttccatgtgcttattaccgaacatggcaaagagatcgccgatagcgttaacacgggttttctgctcagccaacacctgcgcgcggatcgcattttcatccggtgccgggtctgtttttgcctgcggtgcctgaggctgggtaataaccgggtcacgctgggtagtgttgcgcggcggggtgatcatgttgcgaatgctttttggcattttttcaaattcctcaatacgttttgaatgaatacaggccatagcctgaagggatggtgtcacctggtcggcaaaacccagttcaaggcactcgctgccgttcatccaggtttcgtcctccagcattaccgcaatttcttcggtggattttccggttttctgtgcataagccgggataagaacggattcaaccttgtcgagaagatccgcatagtcgcgcatatcgctcgcgtcaccaccagcaaacccccagggcttatggatcatcatcatcgtgttttcaggcatgatgaccggattgcctaccatcgcaatcaccgaggccatggaggccgccagaccgtcgatatgtacggtaatcgccgcgccgtggtgcttcagcgcgttataaatagcaattccgtcgaagacatcaccaccgggcgagttgatataaaggttgatgtgggtgacgtccccaagtgcccggagatcattgacgaactgtttcgccgttacgccccagtacccgatttcgtcataaataaaaatgtcggcctcactgttattgctggcctgcatgcggaaccacgaattactttttgcgctggctttcggacggtggcgcgcccggttctttggcttcggcactggtgcctcctttatcattggcggggtcggtgtcaaacaccaggccctgttcacggttctcgtcaacctcagctttacggcgtgacttaacatcatccgggttgcgaccgctggcacgtatccagtcggattcagtagcagcaccgccgcggatctgcgttttccaggcattcgcttctttaacgggatcaatccacggcataacgggccccgaataaaccgcgttataaagcgagtccatatcaatgcctctcggcagcttgatttctccggcagcaatagccatcttgagccaggctcggtacatgggccgggtcactgaaccgatgaaccagtcctgaagaatcagatagccgtcggttgactcgacaagctcctgccgctgggcactgtacgttccgttgtagtttctggatgtgctggaaaagctgaggcgactgccggcggacacggcacgcagctgtccgttacgaaaagattcgaggttagggttcgggcgatcggatttaatcatcccgatttcttccccggcctgcagttcgtcatagagcataccgggctgaatcatcagctcgcggtcatcgctgcttgaatcagaatcgaagctctgtccgtcgccttttttgatatacatgccgagtgccgcagcaattctggcagcagtaagctccgagtcctcgtattctttcagcgcgctcagacgcatcagaacaccagacaaaagagacgttccgcgggtctggtgcaggcgtcgggtgaatttgagatgcagcatgttctctgcatctatctctttggtatcaaactgacgcccggatactggcaggcttttatagacctgatattttttcgggcgtccccagttatcgacaaaaacgccctgattgagctgggtggcagcatcgctgttcatcggcacaaagtccggctccagcgcttccagccagaacggcacgccagcaaccggctgaagaccatttccggtaccgcgaaccagctgagcaaatacctcaccgtcccggagccacgttcgcagcatcagccgctccagcattgggcgggtaaactgggttgtgacatctggccttacggaccattcgccccactttcggcggatatcagtggccagctttttagcgatcttcccgttactcagcatcggatgcggttcaactatgatgcccttcgcacccaccaccctttcttccagcttgtcgaaaacgccgatcaccagatcgtggttgttatccagccagcgcgcctgctgcctcagcgaaaccgcccccatctggctgagctgatcggctgaacgattttccttctgggctttgtgggtacgcgtttgctttaccgcctcatacgctttaataactgcgcgggcacgcaggcgtgaggctttccagcctggtgaaaacaggccaatcgcatcatctaaaaaactcatccaaacctcgccagcctgtagccgggtcgcccacggcgtttgttattgagcgttgccagtcgtcgctcccattcctgacggccttttctgatttccgacaggttttcgagcgtcatctgctgcccgttgaaagtgattgatttcccctccagaacagacagctcggctgcagcatagcggtcgatcatgttttgaatatctgctggattcacacccaacctcctgacgaagaccacggattagcctgctcggttacgggcttctcacgttttggttttggtttagatttcggcgcaggcggcggggatggcatttcgccagcttccgtctgcgtgtcctcgatccacgtttcccgccgtgcccactcaggagctgacggccatttgattttttcgtaaccactaaggatggcgagcgcgtcggcataaacgagcaggtcaaatgcttcgtttgcgccccggccgggcttactccatttcccttcattcgagcgttcctcatacgtcagttcgtcatagaaccagctgcccagccaggcggggaaatgcacatagccagggccgggtgaatcacgccacagcgcattattcacccggtctttaagggcatcggtctggagaagataaagaggcacatcaccagtcgcctgtgcgcggcgcgttgatctgcccgtgttgtcgggaaacgttcgctggataagtttgctgcgcctgacgctgtcccctttgaagagatagatacgcttacccagcccctcacggcgacatctgcgccagaacttgtaggcattatccgtcacgccatcttcgccccctgagtccacggccatcgacatcagccgcatgccctttgatgggtcagctgcgagcggccacgttttatcaaagacgtcagtgagtaaaagatcccagtcctccggatagctcgccggatccacctgaatgctttcaccgttgccgtcgcagcgcagcgaatgccggatgttgtaacggtcaactatccagcgctcacccatacttccataacccgtaatctgcacaacaaagcgccggttgcgcccggcctgcacgtccacggtcgcagtgagaaactgcacgccgttcggtaccgaacgttttgggacgtcttcggcacgctgctcgagcaattcacttttacgctgctccatgctggctcgcggcaaatagggcctgccgaaatcggtgttgatcaccgtcttcagggtttcttcgctgcgcgtggattcatattcctgctcggcggtcagaaacttataaataagctgcgcccaggtctggtaagcagctgccggaccttccatccagaaggaggcaatacgggaacgacggccatcaccgctaaccaggcctttcctgtcgatggtttgcccgtcccggagccagacacatttcatgttaagcgcacgcttcatgtccggtgtgatcctgcctttacaggcagggcactgaagaaacgccgcttcgctggcaagcacaggatcgctgctgtcgcggtatccggtcatattgtccatttccggctggaaatattcgccgcaatgcgggcatggccagtaaagacgacggcggtcaccacggttatagagcgataaaattccggtggtcggaggggcttcatggggcgtggagcgccgccattttgtgtctctgatatccctcccgggcgagctctcaaccagcgtcatcccggaggacatgaatgtcgtggttcgtttcgatgccagtgaaaaagcatccccctccccgtcgatatcttccggaaagcggtcataatccgtcagcgccacacttttatagtccgaggacgacatgatattgacggatggccagcccagcttcagatagttaccggcgcggaatgtacggtcgtagacgttgttatcgttacgtcttgggcttagccgggttttaacttcagggctacagcgaaaagtacggtccaggcgttttttggaatgctcgcgcgctttttcctcagatacctgaattacaagcatatctgccggatcgcagacaatgttataaacgatccagccgtcaatcagcccgatggttttacccgttcgcgctgggcccacaaacacaaccgcatcgtattcacgcgatgccagacagttcatcggctcaatcacatagggtgccagatccggatcccacggaactgagtttcccgcccccattggcacgcgcatataagtactgaccgcatcggccaccggcatacgacgcggggctcgtaaaataccggaaacatcgcggcggatgtccctggcggatgcccgctttgccatcagtcctcctcaggctgctcctcctcttttccagcgtcctgcaccttctccgccatctggtcgcgcagatcatcgataacgctttgcacacgaactaccgcagcaggcgttaaagcacagtcgcgctcgagcacatccgggagggtttcaagtaccatgacgacggctttcgccatcaatgagaattctcgcgccacttcatctgcgggtattaactgccccgtatcctgttcgaacttcagcctctcgttctctgctttccagtgggacagcctgtcagaagggggcatatcgtcgatgttggccgaaacggtagggatcatcagttcggtcagaatgtcggtcaccagatagagctttaacttgctattgctgcctggagcaggttcaacatttttcagtctcgcggcaaccgtctgacggtgtacgccggttatccctgccagctggttgatattgagttttaaagtggcaatttcctggtccatgatggtgaacactttttgaacgattcgacatgttgcgaaaatggcctctaattaaatcaaagacctgcgcacatgatgatgatgaccctggatccgaaaaactagccgtttcccgcgagcacgccgccccgtggcagggtccccctccgggagtaccttttgataataattatcaattgcacactatcgacggcactgctgccagataacaccaccggggaaacattccatcatgatggccgtgcggacataggaagccagttcatccatcgctttcttgtctgctgccatttgctttgtgacatccagcgccgcacattcagcagcgtttttcagcgcgttttcgatcaacgtttcaatgttggtatcaacaccaggtttaactttgaacttatcggcactgacggttaccttgttctgcgctggctcatcacgctggataccaaggctgatgttgtagatattggtcaccggctgaggtgtttcgattgccgctgcgtggatagcaccatttgcgatagcggcgtccttgatgaatgacactccattgcgaataagttcgaaggagacggtgtcacgaatgcgctggtccagctcgtcgattgccttttgtgcagcagaggtatcaatctcaacgccaagcgtcatcgaagcgcaatattgctgctcaccaaaacgcgtattgaccaggtgttcaacggcaaatttctgcccttctgatgtcagaaaggtaaagtgattttctttctggtattcagttgctgtgtgtctggtttcagcaaaaccaagctcgcgcaattcggctgtgccagatttagaaggcagatcaccagacagcaacgcgccacggaaaaacagcgcataaagcacttcattagcagcgccagatagcgtaatgattttgttactcatggaatatttccttttaggcgtgagcctgtcgcacggcaatgccgcccgagaggtaaacgcaacctaacggcatcacccaggctcactactgaaagactctctttgatgtgcgcgtgcgatgcgcgtagaagactgatttatcaacctgtctttatatcaggattcattacctgactatttgtgggtaaagttcgtagtgcgctgatcgtgcaaaatgattttagttgggaacagttcgcaactctgtcccataaaaatcagcatattcccatctatcccatatccagcgcattgaccatcgggatactgaagggagattccatcatctcttagaaagatcaccatctcttttgtttcaatttgcatatagctacctggaggatttatgaatgcaaggattttcatggactattaccatgagattgattttccatctttattcgcgagagcagtggaaagcgatgacgatgtgggtactacattgcgcattcacctactttgtgagcgcatggtcgaagcatggatatgcgcatgctgtgactgccaagatctctttggaagagataaaaacaaacttttaatcgaatgtaatactaaaatatccatggcgggaaacctgggaatccccccggaacttatgaaatcacttaaaaccatcaactcaatgcgtaatgaccttgcacacaatccatcaatacaaagcattgctgattcaaggatccagagcctgaaggatactctgactgaatactttaaacagcatccaacggaacccagcatggaagaatcaaaactgggtatttttaacgccgagaatcaattaaccgaagaagtttccttagatagtgacagttcaaaaaacagacttaagttaatcttgctgttcagcaagttaatgcaggcgttaatgcaattagttgcagctaatcataatgggcgctgggataaccaatttagccaattcgtttaccatgtgaccatgaacgcaacaaagagataaatccaagcccgttttgtacgggctgttgcattatcacaggcactcagtgaatgcctgctgtaatgccgctagtcgtcgagttgcaacacaccgtg

SEQ ID NO: 1433 - DNA, 49496 bp, Artificial Sequence
  source: /note="Description of Artificial Sequence: Synthetic polynucleotide"
aggcctctcctcgcgagaggcattttttatttgatgggataaagatctttgcgcttatacggttggatttcgcccggtttgcgagttttcagcaattttaatatccaggtgtattgttctggtcgcggaccaacaaaaatctcgacttcttcattcatccgccgcgcaatcgtatgatcatccgcctctaacagatcatccatcggtgggcgcacctgaatcgtcagacgatgcgtcttgccatcataaatcggaaatagcggtacaacgcgcgcacggcacactttcatcaaacgaccaatcgcgggcaacgtcgctttataggtggcaaagaaatcaacaaattcgctgtgttctgggccatgatcctgatcgggtaaataatatccccagtaaccctgacgtaccgactggatgaatggtttaataccatcatttctcgcatgcagacgaccaccaaagcgacggcgcaccgtgttccagacataatcaaaaaccgggttgccctgattatggaacatcgctgccattttctgcccttgcgaggccatcagcatggcaggaatatcgacggcccaaccgtgcggcaccagaaaaatcactttctcgttattacgtcgtatctcttcgatgatctccagcccttgccagtcaacgcgcggctgaattttctccggcccgcgtattgccaactcagccatcattaccatcgcttgcggcgcggtggcaaacatctcatctacaatcgcttcgcgttcagcttcactacgttctggaaagcagagcgacagattgattaacgcacgacggcgtgagctttttcccagtcgtccggcaaaacgtcccagccgtgccagaatgggatcacggaactttggcggcgttaaagcgatacccgccatcgctgctacgcccagccatgctccccagtagcgcgggtggcgaaaggatttatcaaactcaggaatgtattcgctattattttttttcgtttccatgcttttccagtttcggataaggcaaaaatcaatctggtgatagtgtagcggcgcaacttgccccgcaccaaataaaaaagccggtactgactgcgtaccggctgcgaatggatgttaattaatcaaaccgtagctgcggcacaatctctttggcctgtgccaggaattcgcgacgatcggagccggtcagcccttcggtacgcggcagttttgccgtcagcgggtttacggcctgctggtttatccatacttcatagtgcagatgcggcccggttgaacgtccggtattaccggaaagcgcgatacggtcgccacgtttcaccttctgtcccggtttcaccaggatcttgcgcaagtgcatataacgcgtggtgtagctgcgaccatgacgaatagccacataataacctgctgcgccactacgtttggcaaccaccacttcaccgtcacccactgaaagcactggcgtaccttgtggcatggcaaaatcaacacctctgtgtggcgcaacgcgaccggtcaccggattagtacgacgcgggttaaagttagatgagatacggaactgtttcgccgtcgggaatcgcaagaatcctttcgccagaccagtaccgttacgatcgtagaatttgccatcttcagcgcggattgcgtaataatctttaccttctgaacgcaaacgtacgcccagcagctggctttgctcacgtttaccatcaagcatttctcgtgacattaacaccgcaaattcatcgccttttttcagtttgcggaaatccatttgccactgcatggctttaatcactgcgctcacttcggcgctggttaaaccggcgtttctggcgctggcaacaaagcttcccccgacggtacctttcagcagattgttgacccactctccttgctgcatttcgctggtcattttaaaaccgttagcggcagtacggtcataggttcgggtttcacgacgagacacttcccaggtgaggcgctgcagttcgccgtccgcggttaatgtccaggagagttgttgaccgattttcaggttacgcaattctttgtcggcagcagccagttgggtgatatcacccatatcaataccatactgattgagaatgctgcttagcgtatcgccagtggaaacaacatattcatgcacgcccgcttcaccggcgattttgtcatccagttcgtcctggggaatggcttcatcttcttgtgcagcttgatcaatcggctcactggcttcaggtaagagcgaacgaatttcgttctgttccagctcaatggttttgacaattggcgtggcatcgcggtgataaacatagggccgccagacagcgacggccagagtaagaacggtgagcgaccccaacataacgcggtgtggtcgcggtaaattattaaacgccagggcgacagagcgggctatctgttgcacgtaatcacttcctcattaatctcctttcaggcagctcgcatactggttggctaattgattcaggaattctgaatagcttgttttacccagtttgatattcgtccccaggggatccaacgttcccatacgaacggatgtccctcgtgcgacgctctcaacgaccgctggcctgaactgtggctcagcaaaaacgcaggttgctttttgctcaaccaactgtgttcttatttcatgtaaacgctgcgcgccaggttgaatctcagggttaacggtaaaatgaccaagcggtgtcagtccgaactgtttttcgaaatagccgtaagcatcgtgaaaaacgaaataacctttccccttgagcggcgcgagctcgttaccaacctgcttttcggttgaggctaattgtgcctcaaaatccttcaggttggcgtcaagtttggctcgactttgcggcataagttccactaattttccatggattgcaaccgctgtagcccgcgctatctctggggaaagccaaagatgcatgttgaaatcgccgtgatggtgatcttcgtcacttttttccgcgtggtcgtgatcatcatcatcgccgtgaatacttttcatcagcagcggtttcacattctctagctgcgcaatcgttacctgtttcgcttcaggtaatttacttaccggtttttgcatgaacgcttccatctccgggccaacccaaacgactaagtccgcgttctgtaagcgttttacatctgatggacgcagtgaataatcatgttctgaagccccgtcaggtagtaaaacctccgtttctgttaccccatcagcaatggcagaagcgatgaacccaacgggtttaagcgaagcgacaacggcagcatctgcggcctgtgttgcaccgccccagagagcggcggataatgctgcgaaaagaagcgtttttttatgtaacataatgcgaccaatcatcgtaatgaatatgagaagtgtgatattataacatttcatgactactgcaagactaaaattaacatgacaagtctggtttccctggaaaatgtctcggtttcttttggccaacgccgcgtcctctctgatgtgtcgctggaacttaaacctggaaaaattttgactttacttgggccaaacggcgcaggtaagtcgacactggtacgggtagtgctcgggctggtaacacccgatgaaggggttatcaagcgcaacggaaaactgcgcatcggctatgtaccgcagaagctgtatctcgacaccacgttgccactgaccgtaaaccgttttttacgcttacgccctggcacacataaagaagatattttgcctgcactgaaacgtgtccaggccgggcatctgattaacgcaccgatgcaaaagctctcgggtggcgaaacgcagcgtgtactgttagcgcgagcattgttaaatcgaccgcaattattagtgctggatgaacccactcagggcgtggatgtgaatggtcaggtggcgttatatgaccttattgaccaactgcgtcgcgaactggattgtggcgttttaatggtatctcacgatctgcatctggtaatggcaaaaaccgatgaagtgctttgcctgaatcaccacatttgttgttccggcacaccggaagttgtttccctgcatccggagtttatttctatgtttggtcctcgtggtgctgaacaactgggtatctatcgccatcatcataatcatcgtcacgatttacagggacgaattgttttgcgtcggggaaatgatcgctcatgattgaattattatttcccggttggttagccgggatcatgctcgcctgtgccgcgggtccgctgggttcgtttgtagtctggcgtcgtatgtcttatttcggtgatacgctggctcatgcctcattacttggcgtcgcgtttggtttgttgctggacgtgaatccattctatgcggtgattgccgttacgctgctgctggcgggcggtctggtatggctggagaagcgtccacagctggcgatcgacacgttattagggattatggcgcacagtgccctgtcgctgggcctggtggtcgttagtctgatgtctaatattcgtgttgatttgatggcttacctgttcggtgatttactggcagtgacgccagaagatctcatctctattgcgattggcgtggtcatcgtggtggctattttgttctggcaatggcgcaatttgctgtcgatgacgattagcccggatctggcgtttgttgatggtgtgaaattacagcgcgtgaaattgttgttgatgctggtgacggcattgacgattggtgtagcgatgaaattcgtcggcgcgttgattattacttcactgctgattattcctgctgctactgcacgtcgctttgcccgcacgccggaacagatggctggtgtcgctgttttggtggggatggtggcagtgactggcggtttaaccttttccgcattttacgatacacctgcaggcccgtcggtggtgctatgcgcggcactgttatttattatcagtatgatgaaaaagcaggccagctaatctgtcgctgaacacatttgtcggatgcggcgcgagcgccttatcccacctgcggttcgctatctctggtaggcctgataagacgcgaacagcgtcgcatcaggcacactgccagtgtcggatgcggctcgagcgaccaatccgacttacggcatttctggcggcgtgatgccgaagtggttccacgcccgcactgtcgccatacgcccgcgcggtgtacgctgcaaaaagccttgctgaatcaaataaggttccagtacatcctcaatggtttcacgttcttcgccaatggctgccgccaggttatccagacctaccggcccaccaaagaacttatcgattaccgccagcaacaatttgcggtccatataatcgaaaccttcagcatcgacattcaacatatccagcgcctgagcagcgatatctgccgagatggtgccatcgtgcttcacttcagcgaaatcacgcactcgacgcagcagacggttggcaatacgtggcgtaccgcgcgcacgacgagcaacttccagcgcgccgtcatcactcatctcaagccccataaagcgtgcgctgcgactgacgatatattgcagatccggcacctgataaaactccagacgttgcacaataccaaaacgatcgcgcaacggtgatgtcagcgaacctgcgcgcgtggttgcaccaatcagggtaaacggcggcaaatcaattttaatggagcgtgccgccggaccttcaccaatcatgatatccagttggtaatcttccattgccggatacaacacctcttccaccactggtgaaagacggtggatctcatcaataaacagtacatcgtgtggttcaaggttagtgagcattgctgccagatcgcccgccttttccagcaccggaccagaagtcgtgcgtaaattaacgcccatttcattggcgacaatattggcaagcgtagttttacccaaccccggaggaccaaaaatcaatagatgatcgagggcatcgccgcgcagtttcgctgctttgatgaaaatctccatctgcgaacgaacctgcggctgaccaacatactcttccagtaatttagggcgaatggcgcgatctgccacatcttccggcaaagtggtaccggcagaaatcagacggtctgcttcaatcatcctttacctcataacgcggcgcgtagggcttcgcgaattaatgtttcactgctggcgtcagggcgagcgattttgctcaccatgcggcttgcttcttgtggtttatagcccagtgccaccagcgcagcaaccgcttcctgttcagcatcgtcggtcgccgggctggcaggagacgtgagtaccaggtcggcggctggcgtaaagagatcgccatgcaaacctttaaatcggtctttcatttcgacaatcaagcgttcggcggtttttttgccaatacccggcagtttcaccagtgcccccacttcttcacgctcaacggcattaacgaactgctgcgctgacattccggagaggatcgccagcgccaacttcgggccgacgccgttggttttgatcaactctttgaacaacgtgcgctcttgtttattgttaaaaccgtacagcagttgcgcgtcttcacgcaccacaaagtgggtgaaaacgatcgcttcctgacccgcttcagggagttcataaaaacaggtcatcggcatatgcacttcatagcctacgccgcccacttcaattaacaccagcgggggttgtttttcaatgatgatgcctctgagtctgcctatcacatgacgctcctgcgtaatgaatcaaagataatgctgtatgataaaaaaatgctggatagatatccagcgaaggatgaagaaaacttgcgaggtgtctcgatgatctgaaaaatggcgcagtataatttattctacagattatattggaagcaaatatttaaatattacatattcagcgaagaaatgtgtaataaaaatacacattgcgacccctgaaaaaaataaattttttatgctattacgtatattcatatctatttcaatggaatgacaacgtgaatattaattatcctgctgaatatgaaattggtgatatcgtctttacatgtataagtgctgccttatttggtcaaatatcagctgcatcaaattgctggagtaatcacgtcgggatcattatcggtcataacggtgaagactttctggttgcagaaagccgtgttcccctctcaaccatcactacgctatcccgttttattaaacgctctgctaatcaacgctatgctataaagcgattagacgccggactaacagaacaacaaaatcaacgaattgttgaacaggttccttcccggctacgcaaaatttaccacaccggttttaaatacgaatcttcgcgccagttctgttcaaaatttgtttttgatatttataaagaggcgctatgtattccggtgggtgaaatagagacgtttggagaattgttaaatagcaatccaaatgcaaaactcactttctggaaattctggttcttaggttctattccgtgggagcgtaaaaccgtcacgccagccagtttgtggcatcatccgggtttggtgttgattcacgcggtgggagttgaaacgcctcagcctgaactgaccgaggcggtataacttaacgcagtcgccctctcgccaggttcagtcgcgattcgctcatttgcatcgcattctgactaacgtggcagtgggtgatggcaatcgccagcgcatcggcggcatccgcctgtggattagcgggcagtttcagcaaggtgcggaccatatgctgcacctggcttttttcggcactaccaatacctaccactgtttgctttacctgacgtgccgcatattcaaataccggcaattcctgattcaccgccgccacaatcgccacgccgcgcgcctgccccagtttcagggctgagtcagcgttcttcgccataaagacctgttcaatggcgaaataatcaggctggaattgggtgatgatttccgtcacgcccgcatagatgagcttcagacgagacggtaaatcatccactttggtgcgtatgcatccgctacccaggtaggacagttgcctgcctacctggcggatgacgccatagccggtcacgcgcgaacccgggtcaatgccgagaataatagccatcacgcgtctccgttttgctgtttagcaggcctcatcagagagtcgctgcaacctcatcagagatttcaccgttatggtaaacttcctgcacgtcgtcgcaatcttccagcatatcgatcagacgcatcagtttcggtgcggtttctgcatccatatcagctttggtggacgggatcatggaaacttccgcgctgtctgctttcagacctgccgcttccagagcgtcgcgtactttgcccatttcttcccatgcagtgtagacatcaatcgcgccgtcatcataggtcacaacgtcttcagcaccggcttccagggctgcttccatgatggtgtcttcatcgcctttctcgaaggagatcacgccttttttgctgaacaaataagctacggaaccatcagtaccgaggttaccgccacatttgctgaatgcatgacgcacttcagcaacggtacggttgcggttgtcagacagacattcaatcatgattgccgtgccgccaggaccgtaaccttcgtagatgatggtttccatgtttgcatcatcatcaccgcccacacctcgtgcaattgcgcggttcagagtgtcacgggtcatgttgttagacagtgctttatcaattgctgcacgcaaacgcgggttagcgtccggatcaccaccgcccagcttagccgcggttaccagctcacgaatgattttagtgaagattttaccgcgcttagcatcctgcgcagctttacgatgtctggtgttggcccatttactatgacctgccataaaaatatctccagatagccctgcctgttcaggcagcgttaattacaaactgttcaatcgcctgccggttgctccaggacttagtgagcgccgccgcagcagacgcatcaagccacttgtaagccagatgttcagtgaaaacgatctggcgctcgtgcggaagcgcaagacagaaccatgattccgtattacgcgtcacgcccggcgcatagcgatgacgtaaatgtgaaaaaatttcaaactctaccgtgcgctgacagtcaattaaggtcagttgttcagcgacaacatcaatggtgacctcttcctttacttcgcgcatggcagcttgcggcgcggtttcaccctcttccacgctgccggttaccgactgccagaaatcgggatcgtcacgccgctgcaacatcagcacccgtttcgtatcttgtgcgtagatgaccactaagatcgaaacgggacgcttataagccatatcagttattctcagccttcttcacaacctgaatgctcagctcagccagtgcagtcgggttagcaaagctcggcgcttcagtcatcaaacacgctgccgccgtggttttcgggaaggcgataacgtcacggatattgtcggtgccggtcagcagcatcgtcagacggtcaagaccgaatgccaaacctgcgtgcggcggagtaccgtatttcagggcgtcgagcaggaagccgaatttctcgcgctgttcctcttcgttgatacccagaataccaaacaccgtctgctgcatatcaccattatggatacgcacagaaccaccgcccacttcgtaaccattgatgaccatatcgtaagcgttagccaccgcattttccggtgcagctttcagttctgctgccgtcatgtctttcggtgaggtgaacggatggtgcattgctgtcaggccgccttcaccgtcgtcttcaaacatcgggaagtcgataacccacagcggtgcccatttgctttcgtcggtcagaccaaggtctttacccactttcaggcgcagtgcgcccatcgcgtcggcaacaattttcttgttgtcggcaccgaagaaaatcatatcgccatcttgcgcgccagtacgctccaggatggcttcgatgatttctgcattaaggaacttcgctaccgggctattgataccttccagacctttcgcgcgttcgttaactttgatgtaagccagacctttcgcgccgtagattttaacgaagttaccgtattcgtcgatctgcttacgggtcaacgatgcgccgcccggaacacgcagagcggcaacacggcctttcggatcgttcgccggacctgcaaatactgcaaactcaacagatttcagcagatcggcaacgtcggtcagttccatcgggttacgcagatccggtttatcagaaccataacggcgttctgcttctgcaaaggtcattaccgggaaatcgcccagatccacgcccttcacttccagccacagatgacgcaccagcgcttccatcacttcacgcacttgcggcgcggtcatgaaagaagtttccacatcgatctgagtaaattcaggctgacggtcagcacgcaggtcttcgtcacggaagcatttaacgatctgatagtagcggtcaaagccggacatcatcagtagctgtttgaacaactgcggggattgcggcagcgcgtagaatttacctttgtgcacacgagaaggcaccaggtagtcacgcgcgccttcaggcgtggctttggtcagcatcggagtttcgatgtcgaggaagccgtggtcatccataaaacggcgcaccaggctggtgattttagcgcgggttttcaggcgctgagccatttccgggcgacgcaggtcgaggtagcggtatttcagacgcgcttcttcggtgttgacgtggttagagtcaagcggcagaacatctgcacggttgatgatagtcagcgaggacgccagtacttcgatttcgccagtcgccatatcgcggttaatatttttttcgtcacgcgcacgtacggtgcccgtgacctgaatgcagaactcattacgcagttcagaggccagctttaacgcgtccgcacgatccggatcgaaaaatacctgcacgataccttcgcggtcgcgcatatcgatgaagatcaggctaccaagatcacgacgacggttgacccaaccacacagagtcacctgctgccccacgtgggacaaacggagctgtccacaatattctgtacgcatgagatatcccttaacttagctgccggcggatgccccctgctgcgcaggtgaccaagtcgcagcgttagctgtatgtcacaactgaatgaaaaaaggcggctattatactggaaattctgccgcaccgtaagagcctggcccgcgctggaacgcctcgttaccactttatatcgggcctgaaatcagactctacgccagtttgctataaaggtgttgcccgaactcataaaaattaacaaaatttgtcgttccgccatcggctaatcgcattaaggtgagaggcacgattttgttttgtcaggagtcatcatgcttgaacttaatgctaaaaccaccgcgctggtggtgattgatttacaagaaggcatcttgccttttgccggaggtccacatactgccgatgaggtggttaatcgcgccgggaagctggcggcgaaatttcgcgccagcggtcagcccgtgtttctggtgcgcgttggctggtctgccgattacgccgaagcattaaaacagccggttgatgccccctcccccgcaaaagtgttgcccgaaaactggtggcaacatcctgctgcattaggtgcaaccgacagcgatatcgaaatcatcaaacgtcaatggggtgcgttttacggtacggatctggagttgcaattacgccgccggggtatcgatacaatagtgttatgtgggatctcgaccaatatcggtgttgaatccaccgcccgcaatgcctgggaactcggttttaatctggtgattgccgaagatgcctgtagcgccgctagcgccgagcagcacaataacagcattaatcatatctacccgcgcatcgcccgtgtgcgtagcgttgaagagatcctcaacgcgttatgatttacatcggtttgccacaatggtcgcatcctaaatgggtgcggttggggatcaccagccttgaagagtatgcccgccactttaactgcgtgacgcgggcattttaaaaatcactaaagaacgcccaagagcatgtgttttctttagtttattcaatgcattaaaaaatagtttcgcatgaaattcggtaaacttcatgtgtgcaataatgtcccattcatgccccaaaatgccccaaagcagacatttttgccccaagtatgccccacaagtcacgtcttcaagtcgtctatatccatagcacaccgagttacattcttgcatccggggtgtcgacaatacctactttattgagtgtgcgagaattaccaggaacctttccacaatgtagtagtctaatagtcgaatccatctaacattaagaagcgttatgatcactagcctctcattgatatcttctgtaatagtcactctatgtatcatggtgttcgctacagtaaaggtagggattggtttgtctaacaatccagacagaaatgataattaacctcaaccacgtaaccacacttcatacttcatacttcacttaacagtgaagtgctcacatcaccgggcagtcatcaaactccgcattcctggcatcattaatgatgtacgtgatcactccaaatatagcgggtgcagaactgtaaccatcatcatctgctggcagcgcttcccttctcccgttatccagattaaccaggtgcggctgaggatgagtccgatatcgcttgatcctgaattccccgtcgattgcacatatcagcagtgaaccatcgcaggcagtaagtgacgcatccacaacaagcaacgctccctggattatcccttccctgaaatgtgaacgcgatgcccgcatgaaataagtcgctgcgggctgactgattagctgctgatcgagggagattcgtgtttcaacataatctgccgcaggtgaaggaaatcccatgtttacgccctctcttgaataccggataaaaacacagtataaatactgtatatccatccagcaaagaggcaatgagcaatgttcgtggaactcgtttatgacaaaaggaattttgatggtctgcccggtgcaaaagatatcattctgggcgagttaactaagagagttcaccggatcttccccgatgctgatgttcgggttaaaccgatgatgacactgccggcgatcaacactgacgccagcaagcatgagaaggaacagataagccgtactgttcaggaaatgtttgaagaggctgaattctggttagtgagtgagtaaagattttcaatgcccgccacagttacgtattgattatgctgtggaggatattcattttcgtaaacgttggtttgggagaagcggcaaaacggaatgtgggaacaggggaaaatcagataccagatatgtctgcatttccatctggcaataactggtttcagttaccaagtggacatatcgttcagatattttccatgaacgttcttggtgcagatgctaatggcacgtcagctaattaccccattgcttttccaacaacgatgattgctgtcagtgctctatggtctgatgggactgtagcaaatgcaccgacatacaagatgatggggaacacgactaacagaacaactttgacgataaaagtatcagccagctcaggtacttacgggacaatgattattgcggtgggacgataatatgaataaatacagttactctccttcagaaaatgccttttatgctgttgcgttaaaaaatacctatgaattgagtggcacatggccagctgatgcattagatattcctgatgacatttctgtaaaatatatggcggaaccgccacaagggaaaatccgagttgcaggggaaaatggttttcccacatgggctgaaatacctccaccatcacatgaggaacttattgaacaggccgaatcagagaggcaattattgattaaccaggccaacgaatacatgaacagtaaacaatggcccggtaaagccgctattggtcgtctgaaaggcgaggaactggcacaatataattcgtggctggattatctggacgcactggaactggtcgatacttccggtacgcccgatattgaatggcctacgcctccggcagttcaggccagatgacatccggcgcggtgctggtatctgttgcagtcaccgcgtcaatgtaatccagcacggcgttaagtcgggttgtttctgcctgagtcagtttccgtccggcctgtaatttcagctgaatcagactaatggaagccattgctgcatcaatcagtgattggcgctgtgcttctgccgcttctactgaggcaccgtgttgtgcctcagtatctgtcacccatttctcaccatcccatttatcatatggcgttaacggtgaaagcgtgacataaccgtttttgatggcaccgatataatccactgtaacagctgcgccattttcgattgagtaaacagtctcattgcgatggtcttcctcatggctccatcccttacctgtaaatactgccactcttcccggaatgttttcgtccgggtcaataccagtggaacaggcgggcatacttacgccagtattaatatattcatcagaccagcccgtatattcagacgttactgcatcataataaaaacaacgcatatcacccggcactgcagccagcccattttcatcaaaaacaggtttcattatttagccctcaccagaaagttaaatgcaatatttcgcggtctgacagcaacaaaattcacaccatcacccacagagttactgttgaaattaaatcgtgaaaatcctggctgatttccggcgatgccatcatgaaagttaattgcgtgtccagcacctccgcctatattcccggcaaactgagaaaagtttgtagcttcctgccagcttaataattcgcgaccaccatctgcacctcgcccgtcatcccagacacgaatgaaatcaccgcgggcttcaggtaataccagcgaaggaaacactttcgccagcacaggataatcagtggcagagaatttcgcgccgttgaacttcaaaaacaccatactggaccagctgtcgattacagtatttggcattgcagcggacggccagaagaacggaacgccaatagctggagaaccttctcccaaaccaaggtttgtgcgagcgtctgcggcattcgttgcgccggttccgccgtctgcgacagtaaccgcaccgttgctccctttctgcgcaagtttaccgatgcctgggatggttacggcggtgccgttgatggtaactgtgatgctttggtttgctgaggtggtggcgaacgtctcccacgcgccaatattctcgtcgtactctttgatgagctgtgacatggcctgcgccaggccgtcgactgagatattgtccgacacaaggattccatacttctggccgctcagcgccggggaaactgctggcgtaaccgtcattgacgtggcgctgttcacggatgaaatctgaaacagctgcaccgggttagacatcacgataatcgtctggccagcgcggacctggctggcgggagctgtccagtttgtgccggagccggttgcggtatttccgttaatagagatagttccggtgctataaatcataacaactcctaaatttagacaacatgaagcccggagaggtatataaccctcaccagaaataatttctgaattggtttttaatacatgttgggcaacgccagtgttggcatagctatagttgtatcaaatgccattgaccacccacccaaataataattgccgactactttattcctttctgctctgacattcccacctgtcattacaattcctttatacctaatatttccgtaaccaccaacgtgtcgacagttagccccggtataaacaatctggcaaaattcatcaccaatattcaggttcgcattggcgatatttattgtcccatcaaaaatgaatggcttcgtgcaagtaagaagacgtttgcgttgacgattggtttattcaatccatcaactaaaatatcatgtaaacgaattgccataacatttcccactttattttacttactcaacacaacaagtatattaaaattgaaccttgtcaacaacacaaaggagtcccaatgaaactcgctctaattatgctgccattatgtctgtccctcactgcatgtggtaatggtttaaataccggtaaaccaaattccggtgtcattccaaaacctttggatcgagatggtaacggttctttaatttatgataccgaaaaccttccaatgacggggcagtggtgtcacgagattgatcacgaataccgacgaatcggtagcccttctaactgtgttatagactactaaatattaacccctcaaaagaggggttaatattttaacctgtgaatgaaccagatccgtgtgatactatgatagtaggcgaagaaattgacgcacccctgttattttgagcggacactttaatacgcactgttacgtttggacctgttacaaccgcagaatgcatgataagtctctccatgtcttgcacggatgaaccactctcattgccgttaatgtcgattgttcctgcaccattacctttaacgtttgctataacacagacgtgtcttgcgtgcccagaactggatgaatcattataagtcattaccttttctaaatatccgtcactagaccgactcacattcgtccctgtgtgcatatttgcaatgtccccgataaaactttgggcttccacagtccctttgaatttaccgcttgttgcttggatctcaccagtaaagctaccgccactagcatatactacacctctgacggtcacattgttgaattcagcatctccagctttattcaacttccaaccagcagaaccagctgcatagttgttggactggatatagttaccgatttttgcgttctcaatggtgccgtcctggatgaagctggcccggatgaatgtctgcccgttctggatcacgaacggcaaagctacgctatttccggctgccgtggtgacggcgaagcggtcagccaggaagataacctgcgactgcatgccggatggcgtattctccacgccgatacccatccccgcggcgtaatactgcccgttgctggagacaccaaccttgatgttgtacatcgcgctgagttcgccattaacgttggctatagcctgagcgttagtggtgatggcggaggtatgcccgttcacggtcgccgtgatgccgtttatctgcgtggcggtggcctgctgatagtcggagagcgtctgattcaggctgttgatggatgccttgttgccgttgacgtccgtctgcaggctcagcaatgaacgtgctgtggcttccttctcactgacgatcacctcgtcgagacggtccagattcgcgctgttgccggcgaccgatgcagaaagggttttacgcgtggccacctgagcgaggttggcctggattatcgcaattgcagagttcttcaccccgcccgtcatgccgtccatagaaacgctgatgttgtcgattcgctggcccagggcggtatcagccgtcgcaacggtctgctcaagctgactgagtgaagacgaaacattcccgaccgtgctggaaagctcattaacgctggtctgaaccttcccgacgtcctgggcatttttggcgatatctttcgcttgctgctccagttcgtcgttggcctgtttgatatcgttagccatgccagcaattttttcgttgctgtccaccgcgttctcgatcaggtctttgaacgtttccgactctttcatatcctccagaatgtcattagttatttcgctgacatctatcgaggacgtgcccatgatccagtcggtccagtccccggcgttaccgatacggtcaatcaggcgcgcgcggtaccactggcgaacgccggcaggcatggggccatgctgataatctgcagccgggtacggcaccaggaccagcagttcaggattggcgtagtcggcagttgtggcgcgctgaatctctgtataggccgtgtcgcctgagccatccggaaatttccaggtcaggtcgatatgccagaccacatcttcggtcgccaggaagttgagcggagtacccggttttcccgttttaccggagagataagttgtttcaccgtatccccatggtgacgacgtatcctgcgcattcagcgcccgtacgcgcacgtcatagctgcccgaataaatgccctgaaccgagaaaccctgcgcgctggtaaccggaacgtttatccagtccccgttgtccttacgccactgggcaacataccggattgcgccctctaccttatcccatgacacgtccaggcttgctacagtcagcccctgagacacatgatcgctctcagtcaccacgatattcttcggagcagacaggacgcttatcggcgtgacggtgatcgggggagactcgacccgaacgccgtcatcgatgtaacgatatttgtttggatcgtgctgaacggccgtaatagtgaaaccgcctgtactgtcgtcgttagccgcgattgaggtgaccctgaagtactgtattgcgaggttatcactgtctatcgcccaaacagcgcccgccacaggaacctgactgaatgccgtagccaccgtcaccgtttttttatcggcgctcaccgcgctgattgtccgcgtctgggcttttccgtcgggaaggttaaccaccagccggtctttcgccgcgtagtctatttctcgatcgagggtaatttggcggccgttggccgcgcttatacggcccccgttctccttaccagagcggaaaggatcggcgacaccgataatttcagcgggcaaagggatataaccgtccagccccacgccaaacgatacggtcccgtctttggcattggagagcaatacccagcgaccgcgtcggtgcgcttcactttgcgaggtgcagccgattgcggtcagggacgtctgccggacgtcgtaacgttctacaagcgccgaatcgtaaaccccctcaacggtatcgctgtaatggttctgcggatcggaccaggacaccaggcaggagctgtagcgattcttgtatgagccgcccgcataagtaaacagcccatcgataacgtttgagacgttataaacccagtcaacatcgtcctgcgggacgtctgcctggacataaatctgatcgtttccccagaacgttattccacgaaataccgcggcgagatcgttaagtacctgccaggcgtcctcctggctctgaatgaaaacgttgcaggtgaaacgcggttcggtgccaccggccccgtcggaaaccatttcgtcacagtactgggcgattgaatacagcgcccacttatccaccatggacgcatccacgcgcgtgcccatgccgtaaatttcatccagaaccagatcgtaaaagatccaggcagggttattggaccatgccattttgaacccgccggaccatgaaccagaataggttcgggttttcggatcgtaattatccggaaccttaatcagcttgccttttatcttacaggtcactttcggcgcgctgccgttgaattggctgctgtccacttcgacatacaggagcgctgttaaaggataacgaagcttgctgtcgatgacttccgcatacgaaaacaccttgaaggcgttaaccagtttcgaatttgatccgctggcatcagccgtaatacgcctgaccctgacagaccagccggacgtggattttggcagatcgatacggtggtcacgctgatattccgtcgtggtctttccgtcaaacttgccgtttacaaccgttttccaggcgccgccgtccgttgataaatcgatcgcatactcggtgaccgtgcccaccatatcgccattatctttatagagatactggaccggaaggctgagcttgatacggatggcatccagggaaaggtttgtaaactggcgcgtccagggcgcggtggtggtgacagttgtgcccacggccagctcgttgtcgacctggggcatcccggcaatataggtctggtcctgtgtgcccttgcggaactcccatttcacgccgctgaagttgtattccccgctgtcgtttgccagcggcgtatcgttgagaaaaatgttctgagcggtcaggtcgccctgtatttccccctcagaaacggcaatgagcatttttaattttgcgaccgacagcagatcgtcaggctgctcaaccggagtatgtgaactgccacctccccctttggcaccctgcaggatggtttcttgtttaagaagctgcattttttcacccataaaaaaaggtgccgaagcacctttaagttagtggccgctggcctactgctgatcgctcgagtacataccggcgctgactatcgctccccctgcctcagtcagaccgtaggccagggggacaggatgccccatagcgacggtattgaccggcgccccgaaggcgtagttaggcgtgttgtccgtgctggaggatttacccgcgccgaaggatggctggggcgtgagcatctggacaacgccccccagcatcatcgacactccgacccctgtcagaattgacgtggcgctgatagctgttgcactcatcgccgcgccccaggctgccatgctcgcaccagcggtaaagaatgcagcgaccagcgcaacagccccgacaactatctgcaggacgcccgaacttttggccccctcataaacgggcacgatccggtacacgcttccaccgcgggtcatatcaaactcttccagcccgatattgttgccaccgttaaaaaaggcgaaacggatccccttcatatgagcttcagacatatattttttgaatccgggaacctgtgaacacatggccctgagcatctcgcgcaggtcggcaacatcaaactgaacgcgtttaccgaatttttttgccattttaccttcgagaataagcgtcttaaccatgcattctgtccttatgcctgaccacccggaccgttctgtcgcgataatattttccataaggcgttcgcgaagaaaggtgcccgaaaagatgatggagaatgatgttatcacccacatataccgcggcgtgattagtcaccgatgcctgcacactcatcatgatgatatctccgggctgcattgcaccggcggcaatctcaacgaatccctcacgctcccagttgtcgtcgtagagacgctccttgccgctctcccaccattcgtaaggtactgaataattgccgagaacaatgccgtattcgcgcagataaaattcacggataagcgaccagcagtcggcgtaacccagcacccactgccgcccggcataatcccggtcttcacgcggggaaatcgtacaaaaatccccgtccggccaggacatgatcccccactcaatccccgaccagtcgcactggatccggtccagctctgagggcaccagccgaaccacatccggatgggaatgaatgagcatgatgatctcaccgcgcgcgcgggcagcgagctggtcttccggggagagcgtgaatgtctcctcgggtttatcggcaatgttgcggcagggaataaagatttgttgctggcctgactgaacaatcaggccgcaggcttctttggggtattcagcagcgacgtgctgacggatagcatccagcaatttttcacgcatttttatttcccctgcaggtttgcagccggaaaaccgccgaacggcagcggcgcatccgggccgtgacgatcctgacaatcctgccggcggccgccacaaacatctttcgacgggtcatcggtcggtgtaccgtctttggtaaagtatttcgtgccgttgtaatcgcatccggtcccgcttcggtaccagccccgcatacaccaggtgcagacaggcgtaatctgccgtgtcggcagctgcaggctctgaatatcgaaaggagaacacagctcgaaatcaacctgtacccgcgtctctgcggttttagcattgacgtaaaagagctgtaagcgctcatcggccgggctggcacccggattaccgtttttccagttggcggcatcgagatacttcgaaagcgtggtatggattttgaccttagccctgaccatatcgtcatattcaagacacagcgcggtgacatagtttccgacgttcccgacggacagcgtgggcgttggctgggaacctgtactcgataactccatccccttaagttcgtagggatggggatcgtactggtttccctgccagataatggcgggcagattttctgcggcgaaggctgcccacccctcttcctgaatattgtgcgcatgaaaacgcagcacctgatccataccgaattcagtgccgtcgatctcaatcagctgaataacgctgccgggctcaagctgttgtatgtctgccgtaaaactcatactccccccataaaaaaaagccgcccggaggcagctttcagtgtttttcgagaaaatcagggcgcgaacgcctgttcaaaagtgaaggccacagtggcttttttcccggtagggaaagaaacgctgaacgaatcggccttcattctgaacagctttttttcaccccatggagtggtccaccagaacgatttagtaacgtgagacatcaggaaagcgcgcagcgcagccgcctcctgtctggtgcccgtccagtccaggttccacgtttcctgtttgtcgttgatccccatccccgctatctgtttgtagccatccccgaactgggcctgcagcgttcgggctgtttcagtgccctgcgctgtttttcgcgtgcgccaggtaaacgtgtccgtcactgtgtcctcctcgaataaagcacgccgcccgcggacatttcttttttcagtcgctcggtgattgtctgctgaacaatcgcctgcagctgtttcgccgtccccgtggcgttcgcctgatttatgcttccgtcactcccctgctggctgatgctgactggggcataaacactgatcccgcccatgccagcaccggctgcgttcccgccgccgaccagaccacccgaggcatacccgcgcatcaggcgatagagattagccacgccgatgcggctggttgattctttggtgaagacgaattccccgcggtgaacgataccggctggctcgtacttgccgccgtgcccggtaaaaccgcccacgtcaaaaccctgtggccggtatgacgggaccgcgaatgactgaccggcagaggaggttttcgccccgccgctaacccagcccattgcactctggatggtgtaagccaccagcagctggttgataacggacacaatcattttaaggatcgagctggtgaattccctgaagctcgccttcccggttgtcgtcaggctggtaagctggcccgccaacccgctgaacgtagcctgagaaatctgctgaacggagctgaaaacgtttgtcgctgaatcctgatattcggcccaaccctgtttcgcaccggccagccagtttgcacgcagggcatcttcagcttcgaacgtcgccctttgctcttccagaaccttttgctgcgcctgagggttgtacgaatagctttcgctgagacgctgcagcgtagtttgtcgcccggcttcccgggtggataacccctcagactgagcctgcaggcccgccctggcggctttttgctgctgctcaaacttcacggcctgatcggccagctggttgagcttttgctggctggcaaccttatcgcccaggtcggccagctgccgcttgtactcgagcgtttcttctttgtgcgccagcagggatttttcctgcgccgtaagctgacgacgcccagcggcctcctgcagaacggtgaactgattttcagtttgccagagatcctgacgctgtttacttatgacgtcgttcacgctggtatgctgctcaagcgttttaagctgggcctgaagggtgagaagttcggcctgcgccttttcctcggctttgtccccggcgggcgttgagtagcttttgcctttcggtgtttttggatccttccactgcttttcaatcccggcgcgggccgcggcaatgtccttttcagtccacagcgtggcgacaccgtctttcgcatcctggcggtttttctcaataagctgactgagctttttctctgctgaagcccgcttttctgccgccgtcgcgccggactccaccagctggttaaactgctgctggctgcggattgcctgagcctgctggtccgttcgcattttttcccgcgcggctgccagcccttcctgggcgtattgctgatcggcaagatcgtaagcctgctttttcagctccacctgctggcgcgcgtttctcagcctttccgcatccgctttctgcagaacgttgttaccggcataatccgggtcgaccttaagattgctggacagcgcgcggtactctttctctgctgcctgccactcagcaaaagagtcctggcgcttcatcgcggtgtcaggattacgcccgacgcccagcatcgcatcccacgcaccggaggcggcattcttcacccagttccaggctttttcgagggatccgagattatcctcgaccgcaccggcgcgctgaatgaccgcgtcggaatatgcccgcatggccagctcggcagccttctgagaatcccccagcgcctgagcagaagctatctgttcatactgggtggctgtcagaaaatgaagggaatcgttgagcgtcgcgaccgcgttaaccggatcatccttcaggcgtttaaactgatttatggtttcgtcaacggcctgcccggtagcctgctgcagcctggcggcaacattgctgaccatgctgacgtcattaccgctgaacgcgccgctgccaacgacctgcgccagcacgcctgcagcggcatgctgagtgatgccattacctgccagcgagcgcgccagcgcctgcagctgccctgacgttttccccgcgtagttcccggtcaggatcagctgcctgttaaattcctcagactctttgctgccgtcgtaccaggccttacccaacccgaataccgccgcggcaatccctccgaccatgctggcgatcccaagaccgcgcagtgacagaagctggtctatccaccctgcccggttagccagcgtgatcccggagccgcgcagcgcgccgaagttaccgcgcatgacctcgccgatcagtattcccagttcctgccgggcggcggcactttgcagccccagaccgtgcgtggcgactttggcagcttcgagcttgcggatatagacttcagccgcatcgctggcaccgacctgcgccgccttcatgcgcagtagctcggtaccggagagcttttgctctgcaacctgttgcttcagctggctgaggaatcgcgtgcgcgctgcggccgatttttcctccacgatctgcagttctttttgacgggccgtggtgcgggaaataagggcgagataatcctgctgggttatgttgccctgtgccctcgctgcgcgaaagcgcgcctgcacgttcgcaagcgactgtgtttcaccattgagctggcgtacgccgtcgatctggcggaaaaatgatgccgcaagttcatcctgtcgacgggcaagcgcagcggcctgcccgtcattctcacgcatgcgctgattaagctcggtcacgcggcggtgagtttcatcaacggactttgaaacgttctgccagtctttggtaagcccttccgttgcggccgactggcgggatttcatatctgcggcagccgccgcgccagcgtcacccacggttttaaacgcagccgcctgccgctctgaagcgcgctgcattcgcgtctggactttttcagagtcctcagccatcccggttagctggccctttatgcgggcaacctgctcactaaacgtggcgctgtcgacgtcaaggttgatgaccagatcgctaatctgctgggccatatcggatacctcctgttatcccctcagctgcggccatcagcgcatcatcatccggctcgtcatcgctgatgacgataccggaaggagaaagcaggctgaaatgtgcgggggtaagttccgggtcgcggaagaaaagagtggagatggaataaagcagctctgagaaatgcgcatcgagctgagcgtcctgaaaataatgctcccggtagaactggtgccagtcgcccagctcagtggaagtcattccagccagcatggcgcgccagtcgggtcgcccgaactcgcgcgccagattcaggacaaacttcagctcgctggcaagggcttttccgccgcaacgggttctgcgctttcggcctccgctggggcatccggatcggcagctttgtcatcctcaaccggaacgagcatgccggagagcagctttatttccatttctgctttaccgatcgcctccggcggccagccgctaagcacctgctggtaaagcgtctccacatccgtgccagccggatcgttatgccacaaagacatcgcaatcaaacgcgcaccgcagcgaatatttgagccaatcagcctggccgtcatttcctgatcgctgatgccgtcgctgtcagcgctgacggccttttcctctgcggccataaacgtgatgtactcaatacgctgaagcgccgacagctcgaagatggtcagtgattctttttgccaggtgaacttctcttttttcagaaacatgcgtccttccttacgctgcagttacggtaactttgcagaccgcaacgaaattaccgtcgctggtcataacaataacgtcagcggtgcctgccgccacgccggtgacggtgatcgcattaccgctaacggtgaccgttgcttttgccccgtctgaggttgccacacggaacgaggtatctgaggcactggctgggttaaccgtcacattgagcgttgtggttgcgccgacggccacgcttgccgtggctttatcgagcgtaacgcctgtcacggggatattcggggtcccgctttcttctgccagttccggcttgccggtattggtaattttcgctgtacgggttatgacctcttttgccggaatggctttacccaggctgctgcaccagccgcggaaaacgtcgacggtaccgttcgggtatttgattttgtaatagcgtactgagccatcaataaaccatgcgacaaggtctttttgcccttcttcgcccggcttccaggcgagggtgaacgaggtatcgccagcagattttgccccctgggccgtcgcgttccagtcggcatcctcgtcgtcgaggtaagtgtcgtcatacgattcggcggtcatttcgcccggcgtcagctctttaattttcgccaggcggttccagtcgatatccgagagtgggttagcgaaagcgttgcccgttccggtgtaaagccagagggtggtaccggcacctttcacaggggccagcgggtttggagtaggcataagtacctcttaaattgaataggtgattaagtacgtgaaatcgactgaaccccaggtggccatttcatcatcccgctgatagtcataaccctgcggggtgaacgtctcgaccagttcggtcagacctgggatgaaggccattgccggatacactttctcttccatccaggaatcaagcgcgctgtcggggctggaggctttaagaaatacctcgatgtgaacaaccgcctgccacgaatcttcgtcaagcgattacacgtcttgagcgattgtgtaggctggagctgcttcgaagttcctatactttctagagaataggaacttcggaataggaactaaggaggatattcatatggaccatggctaattcccatgtcagtccagtgattctgaataggcgataagtccggtataaccggggataatctcaccattatcagcttcaaattcaggaattgtgccggtggtgatggtgtattgaggctggccatcttccttcgcgaaggctgccaggtcttcaatctgcttagctgtaagaactactgtcatgctcattcctcagttgtaaaaaagccccgcgagtgcgaggcgatttgattgaattctcggctcttatctcagcgcagccccttactgcgtgccggttgctcggtgatgagcatcagcgatgagacattaaagccgaccgaaggccagcggcgttcctcatgttgccgacagagccatatcgacaagaggacgaaaactagcagcatgaatcgcctattggttattcgacagtcgcactgattcgtaaatccgctcacacgtcattcctgcccggtagctttcgtcagatcgtccagcataatatcgagctgcttctgcaaggcttccgagcatgtcggcaagcattgctgcgttggctccggctgttttgcttctgacggaagtggcgagatctgcggtgtgctttgcggcgtccatgtgggtagcgagttttgttgcttcggcgcgcagctgcttaacagtggtagccaggccagcagaagtaacggcagcgctcgctgcttgagcttgagcatctttaacggcctcatcccgggcgattgttcgcccttgttcaatcatacgagctgcggtctgtgcattcgcttcctgtgaagattccgcgctatcccggtcagcccactttattttccagctgcggttcgtccactcactgccagcgagaaacgaacctaccaacgcaacaatcacaatgatgcagatgccacccggcttcactggtctatcccccagcacgtcagtgcgctttcctggtcccgccgttctacctgcccataacatccatccttctggcccttggtcaggcggcaatcgcggccaccgtctttaatccaccagcggatagcttcacaggctcctttcgtatcgccagcattaattcgcttatagaacgtagacgggaaacattttccggggccgatgttatatgggcagaaagaagcgatacccgctttctgtggttcggtcagtggtactttgatatttcggtcaacccacgccagcgccttgtcgcgttcaatggcgtttacctgggcgcatttctcagctgacagcttcatgccctgtactactggcttgccatcaaccattgttgcaccacggcaaatggtccagagtccgccgccgtcgcgatatgctgtcaagctgttaccctctttctcatccagaaactgatcgagaatcacgggtgcggaagccccggcaagaatcaaaccaacgaccgctgcgctcaatttattcttcagctttagagacatagccattgcgccgatcctcccgttctttccagcggaaataccagttcactgcacaggtgattaccgtgcatgcgataccgacaataattgcccagtcgctcaggcttaaccctgcaattctgtcggccaacatccaggacacctcttttgctgttttagctgtttcggcatatgccttcgctgatacaccgcagccggcaagcgtggttcctgatccatatgaaagtctgctgtaaatggtgctcattctggtcatagcctcacctccgatagttcggatggcgctgtgtgtgattgaaggggatcaggcaaccgggctcttatgttcaagtaaaaattaaggatgattcccggtgcctgaagatggtgatcaccacagcaacgggggagcgtggtgatcgttatgattttttcagtttttccacctcttcggtggtctgtataaacctgtctgcctccagttctacgccgatcgcccgacggccaagttctattgcagctttcacagttgaaccagagcccataaagaaatcggcaacgatatcccccggtctgctgctggcgctaatgatctgtttcagcatgtcggcaggtttttcgcatggatgtttgcctggataaaactgaacaggcttatgtgtccatacgtcggtataaggaacaagagcggaaacagagaagcagcgccgaaggattttgtattcctccagcaattctgaatacttgcggtttaatgactggtaggtagccaccagctggtggtgaggatgttcaagcttttgctgaatatgtttatcgatggcgatccgcgtgaacagttcctgcaattttcgatagtccacttcattcggtagttgccattggcttgcaccaaaccagtgtgacgccatgtttttctttccggttgcctcagctatttctttcgagctgacacccagtgattcacgggcattacggaagtaatcaatcagcggcgtcataatgtgctgctttagctctgtgcttttcctttcgtaaacatcctctttacctgtatacggtccaagatagtgctcagcaaacaaaatccgttccgtagatggaaagtacgcacgcaggctttctttattacatccattccagcggcccgatggttttgcccaaatgatgtgattcaaaacgttgaatcgggcgcgcatcataatctctatatctgaggccagtcggtgaccgcaaaacaggtagatgctgccagcaggtttaagaacgcgagcatactcagccaggcagctatcaagccagcgtaagtagtcctcgtcccccttccattggttgtcccagccgttgggcttcactttgaagtacggaggatccgtaactataagatcaatagagttatccgggagggtggcgacgtaatgcagactatcagcgttgattaactcaacactgtttatttttacagtatttttcatagatcagtaagcgtaactctgataggctcacgttgcttttgcgctaaagcagtgggccttggttagcttgtgacctgaaagcatgagctgatggctggccgggtgcgctaacacccaccagccgcccatttccacagcagaaaacccccattactggaggcgtttataacatccgaactggtaatcagataaccccgccatcaccagctgcgtaagtatgagctggcaacgttcgtggctgaggtgggtattctgtgcaatctccccagccgttgctggtttatcgcttaattcattgaaaacagcctttgccgtttctgtcatatcttcctgatttagcatgtcttttacctaaaattagttgcgtgacatacagataactctggttggtgataccagcaagagaagaatttgattctgcaaccaacaaggcctttaggcatcaggcaggaatgagatgcaataaaaaaaccacccgaaggtggtcttatatgaatctttaacgcggacttagcaaatattccacatcatcgtactaccgttatggttttcgataatttttgcggctgggctagtaccaaaagagtgcatatagcaatgatgaatagtaaggaccagatcctgcaacgtttggtcactctctagctccatgatatttaaaccaatattttgagctttgtccaaatgaatatgtctggcatgtgcatacgttgcttggtggttgtttaactcatcacatatacgcttagccttagcttcagcgtcagcctgacctgcgaacataccagtacaaagccatttctggacaatttcgttcgcccagagaattgctttttcacactcgccaatcaacgttggatttagtttttggaacgtaaattgccaccattgcagtgcagcagggttggcaaaaatttccgcttttgctctctcatactcctcaataattgcatgagatgataacccattaaactgtggatcaattggccccaagttcgactgtttacctaaaacgatctgctcagcacaacaagcaagcattgtgccacaactcattgaaatcataggtacaatcgctcggatattggttccgaactttgaacgaagataatgaccaattgattctagagctgcgatatcgcctccaggagtatggagtaagatatccaatcccagactcgtatctaacccattgatagcagacataagaccatttttatcatcatctgacatctggatcagatgttgaaacccaggcccccctttttgaaggaagcctgagtaataagaaattacatttcggccagtatgtttcgataaatcacgtaagtacttgtggcgaacctcatccgctggtgtacgttgagcgatagtacccatctcacccaatacgtctatccaatttggcatgttatcaatttatcagtatgagtacagttggtgagattgctgaccgttctgctcagtagtatttggtgttactgtgctgtatgaatagagcacaccacttctcacattcagatcgttttgctgagcgagaacacgcatagcaaaatgctgtacggattcgcctttttgaaactcttggggttgtatgcccattttttcgtaaaattcagcagcgctcatgatatgtccctcgtttttttctacatctatgcaattccaggagccatcaacacaagatgtagtagttagcagtcgtcaaatacacgaaaagcctcaagatgaggcttaaaaagattctttttgataaagatttagccaaactatagcggtcaaaatgcagatttgacaagtataaaaagcacttaaagcctataaataggcagtttttgagaattaaagcatctttaatgaggttgaacaaaatgcagtcttgacgctgaacaggactttactggaacgtagagctaaatggttcgatttcatgaaccagttacaaaaaaacccgctcatcggcgggtttataaaactttggcaacatatcaaatatgcttcaaatatggcttattttgttgcattttgcaagcgtgtttgaaggagatggtgaaatttacttcacatttctgccactttgagggcttcttcttcctcatagtattcaagagccatggccaacgcagattcatcaagctgggtaaaagcggcctttaacccagcccagtgccctgaatagacacgcaaccatgtcgaacggtcaacgctaaccatgcgggccaacgctgcaccagcatagtctttataggtttcattatttctggttgcggcaatttcctgccctgccagccataccaggcctatcagtttctttactacgcgctcctgaagggagttatcacccaggcatttctgataagttttccagacgtattcacacatcatcacctggtgcttatagctaaggtcaaaaccgtagcagtaccgcaaccaggcctgctggtatccactaagcgcggacactgccctacgccacggcgcggactcaaattccgcatcttttatcggcggcattggcctgcggcggctgcgtgtttccagcacatacagtggcgcggaaagtgagttaacaaagcgtggccccttctctccttcgagttcgacgagatgaattccacggcgaggggtggcatttttgtctgctggtgggtgttcactgaaagcctcaagctgcccttttgttcccccagacaggtcaggtagcgcgcggcgcaattctattcttacaaaattcaggtcttgttgattcatgcttctttgcgctccatacacttaagctttcgcaattacgccgatcgccagcgcccgatccataaaacgcagtagcagctcaagctgcgtaccatgcttctgctcgaatgccggtacatcggcgtgtaactcgtcgtggcactctctgcacagagggatcacgaagagatcatgggcttttgttgctgtcccccccataccgtgccctacgatatggtgcggatcatctgctggccgtcggcaacactcacagggttgtgttttaacccagcgggtgtacgtctcatttatccagcggcgtcgctttggcctgagcatgaaagattctggagactccggatcaacagagagcgtgaggatcttcttcgccttctcctgcacgaggctggttgcagaagcggaaggcacaatgtcgctttccctcatgaccgagcggatcttatcatccggaaggcgtagccccttgtgcgcaacgctttccggaataacatcagccaggtcgtttctgaccatccaccagcacagttccggaagcgtcaggatatgcgactcgggaaaaccagaatcacgccgaatgacttccagaatccaggataccaggtttcctgccgctatacctgcaagctgttcggtatgctgccccgacaaagtgtgatcgcaatgccagcacaggcgaatacttcctggtgggtgccgcattgttgtgaagttcttgtcgtgccacgatgaatgtggccactggcattcaaaccgattactcaaccattgctcaagggaaggaagcccaccagcacgctgaataacccgatcattctcgaagacctgccgcattaccggatcatcagccagcggctgaatggcggcgggaacagctcctgtactgaatgacgccatttcttctggttcaggctcaagcagaacgcgaccgcgcataaagaggtgcatcagttccgcgccgggacgaaacaacacaatccccatacgatgggcgatctcgggggtaagcagagctctcacgcgacctgccccctggcaatgtgttctgcccacagtccaccaatccagcgcacgcctttcgccgtgaaacgtgcctggctgaatgcatgatttgaggttacggatgtgccggttttcacttcaaaacggcccgcatcaatatgctgatgccgtggggtcatcgttccgccaagacgatacatgatgtcgttctcaaggaggaataaccgcagatcgggctctttggccttaagcagttttgccacctggcggaatgacattgacccactggctgtacagtaccgatcaacaaacgctaccttcggcgccgcggcagccagttcgttagtcaactgctgtttttgttctgcaaggtcagctgcaagacgtagggcttcagagaatgattgaggaatcgtctgctgctgtgcctgctcaagctcctgccagcgatcaaccagacgcgcggtaaactccggcgacagctgcgcgacaacgatataactgtcccgcttccctatcagataaaccgataccgactgattgaggtgatttttaacttcccccattggggggagttcaataacaccgcgctctgccaggcgttcaatggaccgtttaacatggtcatgtcttgattccaccagctcagcaatatcgctgctggacatggttaacgctgttgttgctaactggctcatacttttctccatatcaggcggctgcacccgccggttcatatctgctgattgttatctctacccgacctttcggcacaacgggtccccattccaccagcatgcgcttaatctggctgtcgtcttcccagacacccgcatgcgtcagcgcgtcaaacagggctttgttgtaattatcgatatcccggcggcgcgcatccggcgggtacagagtgatttctaccgctgccagttcagtcgatggcttcgggagacgtcgtaattgctcaatgatcgccacgcaggcagcgctctggtatttacggccagcggcgctaatgaggtgacgaccggccagcggccccttgttaggggcgcgccagtaagtgttcacgctcggaggaaaaggcaggatcagtttcacgcggcctctccccgcatattgcgaacaagttcagaagcagcagtaatgatttcgctggtggcagtccgctccagccagagttgattgatattggctttcagcttgtgttgcagtgactcatccagcatgtcagcaccatccacctggtcgaatacaattctaacctccagcggccagatacgggactcgggaagcggatccgatactggtttagctttctcacgaatgtgcatgcggatctggcgaatattggaccaactggaaacatccaggcttcccatggctgcaatgaagtcagtgctgttcatgccatattcaccggatgcttcaagggcaacagtgcgaatacgttccgacatatccaggcgcacagcagcgtcatcgaattcaatcgacaacagccactcatccacaccgaacaaaatactctcacgaataagcagcttcgctttgtcgatcgttaaaggtgatacctgagtgaattccggtgcttcgacagaatccgccgcccaggtatgcccaaacttcgattcactgaatgtgtattcttctttatcgccaaacgcagctctaacgcatgcccacgcctcgacaccgctgatagcaaaaatatctttctgggtgagtggcaactctgcttctggcttatcagctgcaggaggtgtggcagttacaggttgagacttgctggcagcaaattgtgccaaagccataaacgcccgcccttttgcctccagttctgtgcggttgatatagctgaaccgctcgccacgccatgacttatcgaatacagctatggcaccggcaaaaaacgcgctggtgggtttctgtttttcgtcagcaggtacaaaccacacaggcagatcgaacccaatgcgcccgcgaatgaatacaatgtgatcggcatcttccggccaccacgtttcactcggcgcggcttttatcaggaatacatagcgaccgcccttctcgcgctgggctgctgcgtagttcatgatgtgcgtcatgccggtgatcgcctgcttctcgtggtactgcgaacggctatacggtgggttgccatagccagcgccacccagttcagccagacgttcagaccagtcctgcgtcagcgcgttatcttcggcggtgtaccatgccgggcatttcgcgttgtcgtcgtcagcaaacaaatccagaactaatggaccaaatagcgcgttgatcccccaaaaaagcagatccggtgtccgccactgatcgccaacctctttcaattcgtgagctggtttgctacgcagtgccgccagcgcctggcaatatttattggtcatcatgaacggaaccccgaattttctggcagtgagtaatcaacactctggaagtttgcgcggctggctgagttagtctcccatttgccgttaacgcgttcaggccggccagcactggaccatttggtcgcgctttgcaggtaaccagggaagttttttggaatgaacagagttgccgggcggaggtattgcgcctgctcgctatcacgccaatcggcatttttgtaatccactaccaagcacaggtcatcaacagtgaattgttcccgaagacgggcgcgaatattctccagcgacgtgctgcatacctggtagcgtgagccagtagtctgattcaggtaagacaaaacctgtctggcctgatcagtaatcacaacctcagggtcgggttgcgccgcaaccggacaagagggttttgaagttacttgtggttcttgttttgattttactgacggatccccaccagattctgacgggtcaaaaccgccttttttgctggatttcgacgcctcaaattttgacgggtcggattttgatgcatcagattttgatgggtcagattttgatgcgtcagattctgacaggtgagaaaaagcagcctctcgcaacttaacgacgttaagctgatatacgttcgatgcgttacggttcccattacggcgctgcttacgggaaagccagccatccttctcaagctgagcaagggccgtccttaccgtactttctccagcaccgatttgacgtgcgatcgtgccaatagacggccagctaacaccctcatcactactgaagtcggccagacgcgccatgatggcaacgctggataacttcatgcctgacgaagcgcatgcatcccatacgtaaccggttaatttagtgctcatggtcgtcctttaattctgtaaatttacgctggaattgttcaagagggctgaagcactcatgatcgtacccttcgcgaaggtatataacgcgctgtgtatctggctcccagcggacaactctgacgggaactccgtagtgatctctgaaccgccggttaacttcagccattcctcgcgccccttctcgttcatctgaacaaatgcttctaccatcaagtctgctggctggtagttgcctccatcagccgcgttatttatgatttccacatagccgaactgggcatctttacccaccagcggcaaacatctgaattgcttagctggtctgaatcggtttacactgttcatgcgttagtttctccactgatacgacacgccaaggcgcccggagctgcacactcgcgggcgtcaccttttctgcctgttgaaacgaatacgtcaatcgcctgatctgaaacaccaaccccataaagcgccataaatcccaggaacccgtgaatctggtggcggagcttcttactgaataattctgaaagcattttgcgctctgatgaatcaattaccccatcagccgctgctgccatcttggcattagccagctcaccagatgctgctgccgctttcatctcaatgctgtacagctcaacgttatccaggctctcagcagttggaacatccaccagccatttcccttttcggttcgcctggtactcggccaagtaacaagaaccagacaggtcctccatccgttccagttctgccaaggtaaagaaccgactgccacacttctggtacaggtggttgtggaactggtcgatagtcatccctaaatcggaagccatacctaagcgaccatgcttgtgtgccttacacatcaggcggattgctgtatttatgctgtctaccatgttgatttccctctggtagttaataatcaacttaaagttgactattgttgttagcggaaggtatgccgtcatttttgttcggataaatatcaggtcgtaattgatggggagttactacccatccgccccattggcagagttgaataactctttcagaaggtactcggttctttgcaatccagttcgcaacagattgaactgattggaattcaaaccgccttgatacctctgaaatcgacccgatcgccttcacagctttagctgttacattcttgtgttgagatgacatgtgttctcctatgactaagcctgcatcaatactacttatagtagcaattattagcaacttaaaatagaaatgacaactatgccttgtgcgcttaatcttctacttatggtggaaaatgctaaatacaaagactttgccgaaaggctaaacaggtctctccaagagcaatctattggagttaaagaattgtcagagttcagtggtgtctcgtatgagatggcgcggcgctacactcttggtactgcaaagccgagagatgagaagatgattcgaattgcagaaagacttgccgtctcaccggcttatcttgattatggtgtgcctgttaatggtggcgacgcgccagccaaaggcacggtcagaatagagcaattggatgttcatgcttcagccggttccggatatataaaccaaccattccctacaatagtgagctcaatagagattccagaagagaggatcttcgagttgtttggtcgtagaagccttgatggcatcgtcatgataaatgttgatggcgatagcatgatgcccacgctttgcccaaaggacctgcttttcatagacagcaaggttgaacaattcagcggcgacggcgtttatgtgttcaattttgaagacagtacgttcgttaaacgtttgcagaaggtaaaagggcgccgactggcagttctttcagacaatgaacattacccgcccttcttcatagaggagcatgaaatgaatgaactatacatattcggcaagctaatcagatgcttacctctaaaaatgatagagtttggctaataattaattcatcaagaaaccggcgaaagccggttttttttacgcctccaattcctcacctcataacactacactactaaaaatttcattttctactttttgttgttgcaattatctacttaaagtagctatagtcattgcatcgaaagcgaacaggcaggacgcccacgaagtagccgccggtggcatatgaataaccggatgattcgctgacagaaaacttaggttgggggtagaggtttacatgaatcatttattcacatgctcattttgcggagcaaccgaactgggagcgataaagatcgtcgcaaaaggtggtaaggacgaacctgccatctgttcggaatgcgtagtcacatgtgtagaaaaaatgatcctgactaaaaaatcagaggctgaaaaaccaacctctgataacgaaataatatcagtcgataaaaaactatttaaagagcttcttcagcttgtcctcaaccttcctgatttcggaagtaagctggctgctgttgacattgatagtagctccacatcgacaagtgaaacttttgttcgacttgagccaagcgattttcttcttcgtcttagtgccgcacttagggcatgcgggtaacgtaatttcctggttatcaaaagcgcccataaacatccctcttggttgtgtgagaacaccaagataccaccgcgcctgatgtggttaaaagcaggctaaagcaataacaagtaactccctgttctggcggcccggtgttttcccgtgtatttccggtaaccgccagcctttttcagggcacaacagaaaagggcatcaccgggcgacgggctcataacccaatccacccgggcaaaaagaaagcggtctctgcaagccgccgaccaatgcaggtgcccttctctgttgtgtatggagaaactaactttttagcgtctgtgcagatgcgctgaggaaccgagaatgaataatccgtttttcaaaaatatgttggtgtatcgcattagtcgcgatttcaccatcaaccaggaagagctggaacagcagcttgaactatttcgcttcactccatgcggtagccaggatatggcaaaaaccggttgggtatcaccacttggtcagctgtcagatcgcttgcatcacactgtcaataatcaagtgttgttggttattcgccgggaagaaaaaatactgccatctcctgtcattactgaagaactgcgcaagcgtgtgtcgcgtctagaatccgatcaggggcgtcgcctcaaaaaaactgagaaagattcgctgcgtgatgaagtgttgcactccctgcttcctcgggcgttctccaaaaactcgactgttggtttgtggatcaacgtcaccgacggtctgatcatggttgatgcagccagcgctaaacgtgccgaagactcactggccctgcttcgtaaaactctcggttctctcccggtggtaccgctgactatggaaacgccgatcgaactaactatgaccgactgggttcgttccggtagtgcgcctgctggctttggcctgggtgatgaagccgaactgaaagctattcttgaagatggcggtattggacgctttaaaaaacagactctggtcagtgacgaaattcatgtgcatctggaagctggcaaagtagttacaaagctgtctatcgactggcaacagcgcattcagttcgttctttgcgatgacggcagcatcaaacgccttaagttctctaatgagattacagaacaaaacgacgatatcgaccgtgaggatgcggctcagcggttcgacgctgactttgttctgatgaccggcgagcttatctctctcattaacggattaacaacctctctcggcggcgaagccaagcgataaacaccaggcaacaattacccccataagcatgggttgggttgctgcacgctaaattcagcaattcattaatttaatggcgcggtgcagcgcgccaatatggagaaaaccatgagctacattcagacattatccggcaaacattttaattacctcgatatccaacaggacgatatcgtgatcgaggatattgctaccgcgttgtctcatatctgccgctttgcagggcatcttcctgagttttacagtgtcggccagcatagcgttttaaccagccacctcgttccgcaggagtttgcattagaagcactgcttcatgatgctgctgaagcctacctgcaggacatcccctccccacttaagcgcctgcttccggattaccaggcaatcgaagctcgtgtggacgcagccattcggcagaagttcggtctaccaactgagcaacacccaaccgtgaaatatgccgacctggtgatgctcgccagcgaacgccgcgattttgagattgacgaaggttccatttggccatgcctcgagggagttgtcccaacggatttattcattatcaacccagttcgtcctggccagtcatacggcatgttcatcaatcgctttaacgagttgatggagcagcgccaatgcgccgcatgaaggtaaaagaactcgtagcggaggcgtttgcctccgttgctgaattgccaccaaagcatgcgccgcttatgcgcgaagtcgccaccagactggacgctacgttcgcagcattaaaagagtctctggtgcaactggaacaggaacgtaaagataaaacgccatgaccgtatttgaatatctccaggctcatccgaataccaccagcggtgaaatcgccaaaggtatgaacaaaaagaccccagcggtcgccggagcattatctcagctctatggcaccggtcggatcgtgaagtctggtgttcgcaagggtattccaacataccgcattaacgatatgccgtttggttgcagtaacagcctaaccatgatgtttaaccagctcttgagcagagccagacaaggagcagcccaatgacagcactcaacaaacaggcgctgcgtgaagaattccagttcatgcaggacaactatagcgacccggcagaccacgatcggcaggtgatttacatcgaggcggaggcgctgctggatgagttggaagccaaagactcaacgatagcagcacaacaacatgagatccgtatgttgctgaatgcgcttgaggaaaaaccatgcccgaaatgcaacgacacaggaatgactgatagtggcggcacgcagccatggggcgagccgattgagattgaatgcgactgccgacagcaggatgccaacaccgcagaacttgtagccgctggcattggcgtgaagggggagtgagatggataaattaatcaaacctaccgccaaaggtaaatatgacggttcatgtgattatctttgctcggaagatgcgcgattcatcgttatgcgcggcgattatacggaagcggaaataattcaggcttctgtgtctcaagatgtaatcgactcggatggtgcggctgattttgcaagtagcgcccgctattatcagtgctggtacaaagttagcccaataggtggtcaggatggctattcaggctggcatcatcctcgtgattcgccgtgtcgcggtgcatatttcgcatcagttttgcaatgggattaaggaggactaacccatgacaactaacaaccacccggcgcacggtcctgtatcactcgatcgcctgcaccagatacgcgaacacctgctgcatgatacccaatactcaaacggcgggaacagagcctacattctcgctgatgtattgaaggtgattgatggggctattgcccgcgagctggtacgccgtgagcatgcagcgtggtcacaggctactttcggcgatgtcggtccagttggtccgctgaagcacctttccaaagaagcgctcgaggctgctgctgaaccaggcgaccttagcgaatgggctgacatgcaattcctgttatgggatgcgcaacgtcgtgccggtatcagtgatgagcagattacccaggcaatgataaaaaagctggctataaataaggttcgccaatggcctgagccgaaagacggggaacctcgattgcatatcaaagaacagtcagagcaggagaaaaaataagaatgtttagcctgattcggcgcggtcaaatctacacggacagtagcaactggcccgtaattatccatagctgtagtgatcactcggtccgaattaaacgcaatgatggcgagctgagaacgattagcatcaaacgctttaacgaagattttgaacgagtggagcatgatgagtatcgcaaaatatgtgccgaaatagagcaggaaacaaacctgaaaaacctacgtgcgatgcgtcgcggcaagattactgaatagccaaacaggagaatatttaacgtgaacaacttaatgatcgaccttgagtccatgggcaaaaaaccgaatgcccctattgtctccattggtgccgtattcttcgatccgcaaagcggtgaactgggtcaggagttttacaccgctgttaatcttgaaagcgctatggagcagggagcggtgccggatggtgacactattctgtggtggttaagacaaagctcagaagcacgatcagcaatctgtgttgatgatgcgatgccgatatcatctgccctatctgaactgagccatttcattaatcggcattctgataaccctaaatatttaaaagtttggggcaatggagctactttcgacaacgttatattgcgcggcgcatatgagcgtgccggccaggtttgcccgtggcaattttggaatgatcacgacgtcagaaccatcgtcacattaggcagatctgtaggtttcgatcctaagcgtgatatgccatttgatggggttgcacataacgcactggctgatgcccgccaccaggcgaaatatgtttcagcgatttggcagaaactaatcccaaccaccagcaacagctaaagttttccccgggtgcagccgggataatggagaaataactatgagcaatattttccagttagctcccaacgattgggtttgtgaaagcgttttgatcgcggttactgggctcaaacccggaaccatcctccgtgccagaaaagaatgctggatgattgggagggagtatatccacgtatcgcctgacggaaatcctaaaccttccagtgagtgcatgtataacagaaaggctgtagatgcctgggtcgcttcaatgaaaagcaagcaaccagggtgatttgatgccatgaaaaaggtaagctcgtatcgctcttgggcgtctggaggtaacaccaatggataaagtcacatatccaacaggcgtcgaaaaccacggtggcacattacgcatctggtttaattttaaaggtaagcgtgtcagggaaagtctcggtgtccctgacaccgctaagaacaggaagatagccggggaactgcggacatcagtatgttttgccatccgcacaggaacctttgattatgcaacccagtttcctgactcccctaacctcaaggcttttggtgtaagtaaaaaagacattacagtgaaagaacttgaagaaaaatggctggatctgaaacggatggaaatctgcgcgaacgcatttaatcgctatgaatctgtcgcaaggaatatggtgccgaggatcggaggtaatcgcctggtgtcagcagtaaccaaagaggaattgctgtatctgaggaaatatttgctaactggttatcagaatccgacgaaaaacaaagccccggcaaaagggcgaagcgttgttactgtgaactattacatgacgacaatggccggaatgtttcagtttgctgcggatcacggttacttagaggtgaacccattcgagggaattaagcctctgaaaaaagccagggcagaaccagatcctctgtctcgtgatgaatttattcgcctgatagatgcatgccggcatcagcagacgaaaaacctgtggtcattagcagtgtacacaggaatgcgtcacggggaactggtctccctggcctgggaagatatcgacctgaaggctggaacaattaccgtcagacgtaattatacgaaacttggtgagttcactctaccgaaaaccgaggcaagcacagatcgagtggtgcatcttatccagcccgcaatcagtatcctgaaaaatcaggctgaaatgacaaggctgggcaggcaatatcacattgaagtgcagttacgtgagtacggccgttcggtgaaccatgagtgtacattcgtctttaatccgcatgtggtcagacgcagtaagcaggtcggatttatctaccgggtcgattcagtaggcgactcatgggaagcggcacttaagcgtgcggggatcagacacagaaaggcgtaccagtcacgacacacctatgcgtgctggtcattatcagctggtgcaaaccctagttttattgccagtcagatggggcatgcgagcgcgcagatggtgttcaatgtttacggtgcatggatggctgacagcagcgcagagcagatcgcaatgctgaatcagaagctggcagattttgccccattgatgccccatagccacgagaacagtacgggaggattattaaaatcagtaagttaacccctaacgcccgtcatgttaactgtgtggagggtaacaccacgctttatgccctgccgaaacccgaggttgtcctgcgctggcgtgagcagaccacagatgacttccgcttctgttttaagtttccggcgaccatttcgcatcaggcagcattacggcattgcgatgatttagtgactgaatttttgacccgcatgtcaccgttggctccgcgcattggacaatactggctgcaactgcctgccacattcggcccacgggagctgcctgcgctttggcattttctcgattctcttcccggtgaatttaattatggggtggaagtccgccatccacagtttttcgccaaaggggaagaggaacaaacgcttaatcgcggtttacatcagcgcggcgttaatcgggtgattttagacagccgcccggttcatgcagcacgtccatacagtgaagctattcgcgacgctcaacgaaaaaaacctaaagttccggtacatgctgtactgacggcgaaaaatccactgatccgttttatcggtagtgatgatatgacgcaaaaccgggaattatttcaggtctggttacaaaaattagcgcagtggcatcagaccactacgccttatctttttttacatacgccagatattgcccaggccccggaactggtacataccctgtgggaagacttacgtaaaacgcttccagagatcggagcagttccggctattccacagcaatcttctcttttctgaatttgccacctatcatagacaggtgccatcggccattttaaagggagtttgtatggtaagcgcgctgtatgccgttttaagtgcgttgttattaatgaagttctcttttgatgtcgttcgcctgcgaatgcagtaccgcgttgcctatggcgacggcggttttagcgaactgcaaagcgctattcgcattcatggtaacgcggtggaatatattcctatcgcgattgtgttgatgctgtttatggaaatgaatggcgcagaaacctggatggtgcatatttgcggcatcgttttgcttgctggtcgtctgatgcattattacggttttcatcaccgtctgttccgctggcgacgttctggcatgagcgccacctggtgtgcgctgttgctgatggtgctggcgaatctttggtatatgccctgggagttggttttctccctgcgttagcgcacaatacgccactttctttttcccggatttttacgttatgtctcaccgcgacacgctattttctgcccctatcgccagactgggcgactggacctttgatgaacgggtagctgaagtcttcccggatatgatccagcgttccgttcccggctattccaatattatttccatgattggtatgttagccgagcgcttcgttcaacctggtacgcaggtttacgatctgggttgttctctgggcgcggcgacgctctcggtgcgtcgcaacattcatcatgataattgcaaaattattgccatcgacaactccccggcgatgattgaacgctgccgtcgtcatattgacgcctataaagcccctacgccagtagacgttattgaaggtgatattcgcgatatcgccattgaaaacgcatcgatggtggtgctgaattttaccctgcaattcctggaaccttccgagcgccaggcgttactggataaaatttatcaagggctgaacccgggcggtgcgctggtgctttcggaaaaattcagtttcgaagatgccaaagttggtgaactgctgttcaacatgcaccacgactttaaacgtgccaacggttacagcgaactggagatcagccagaaacgcagcatgctggaaaacgtgatgctgaccgattccgtggaaacccataaagcacgcctgcataaagccggttttgagcatagcgagctgtggttccagtgctttaactttggttcactggtggcattaaaagcagaggacgctgcatgatcgactttggtaacttttattctctgattgccaaaaatcatctttcacactggctcgaaacgctgcccgcgcagattgctaactggcagcgcgagcagcagcacgggctgtttaagcagtggtccaacgcggtggaatttctgcctgaaattaaaccgtatcgtctggatttattgcatagcgtaaccgccgaaagcgaagagccactgagcgccgggcaaattaagcgcattgaaacgctgatgcgcaacctgatgccgtggcgcaaagggccgttctcactgtatggcgtcaacatcgataccgaatggcgttccgactggaaatgggatcgcgttatgccccatctttctgatttaaccgggcgcaccattcttgatgtcggctgtggcagcggttatcacatgtggcgcatgattggcgcaggggcgcatctggcggtgggtatcgatcccacgcagctattcctctgccagtttgaagcagtgcgtaaactgctgggtaacgatcagcgcgcacatttgttaccgttaggtattgaacaacttccggcactgaaagcctttgataccgtcttttcgatgggcgtgctttatcatcgtcgttcaccgctggagcatctctggcagttaaaagaccaactggtgaatgaaggcgaactggtgctggaaacgctggttattgatggcgacgaaaacacggtgctggtgccgggcgatcgttacgctcaaatgcgtaatgtctatttcattccttccgcgctggcgctgaaaaactggctgaagaagtgtggttttgttgatattcgcattgcagatgtgagcgttaccaccacagaagagcagcgacgcaccgaatggatggtcaccgagtctctggccgattttctcgacccgcatgatccgggtaaaacggtggaaggttatcctgcgcctaaacgcgcggtgctgattgcgcgcaagccgtaaaggtctggtaatactgccggatgcggcgtgaacgccttatccggcctacaaagtcttgctaattcaatatattgcaggggctatgtaggcctgataagcatagcgcatcaggca

SEQ ID NO: 1434 - DNA, 79 bp, Artificial Sequence
  source: /note="Description of Artificial Sequence: Synthetic primer"
tggaggctttaagaaatacctcgatgtgaacaaccgcctgccacgaatcttcgtcaagcgattacacgtcttgagcgat

SEQ ID NO: 1435 - DNA, 79 bp, Artificial Sequence
  source: /note="Description of Artificial Sequence: Synthetic primer"
gataatggtgagattatccccggttataccggacttatcgcctattcagaatcactggatctgacatgggaattagcca

SEQ ID NO: 1436 - DNA, 28 bp, Artificial Sequence
  source: /note="Description of Artificial Sequence: Synthetic primer"
gtgattaagtacgtgaaatcgactgaac

SEQ ID NO: 1437 - DNA, 20 bp, Artificial Sequence
  source: /note="Description of Artificial Sequence: Synthetic primer"
ctctgtcggcaacatgagga

SEQ ID NO: 1438 - DNA, 79 bp, Artificial Sequence; identical to SEQ ID NO: 1434
  source: /note="Description of Artificial Sequence: Synthetic primer"

SEQ ID NO: 1439 - DNA, 79 bp, Artificial Sequence; identical to SEQ ID NO: 1435
  source: /note="Description of Artificial Sequence: Synthetic primer"

SEQ ID NO: 1440 - DNA, 20 bp, Artificial Sequence
  source: /note="Description of Artificial Sequence: Synthetic primer"
tggaggctttaagaaatacc

SEQ ID NO: 1441 - DNA, 20 bp, Artificial Sequence
  source: /note="Description of Artificial Sequence: Synthetic primer"
gctggcgattcaggttcatc

SEQ ID NO: 1442 - DNA, 40 bp, Artificial Sequence
  source: /note="Description of Artificial Sequence: Synthetic primer"
gctggcgattcaggttcatcgttttcaccgtaacacgcca

SEQ ID NO: 1443 - DNA, 42 bp, Artificial Sequence
  source: /note="Description of Artificial Sequence: Synthetic oligonucleotide"
tcgacatttatcccttgcggcgaatacttacagccatagcaa

SEQ ID NO: 1444 - DNA, 49 bp, Artificial Sequence
  source: /note="Description of Artificial Sequence: Synthetic oligonucleotide"
ggcgcgccttgacaattaatcatccggctcctaggatgtgtggagggac

SEQ ID NO: 1445 - DNA, 50 bp, Artificial Sequence
  source: /note="Description of Artificial Sequence: Synthetic oligonucleotide"
ggcgcgccttgacatcaggaaaatttttctgtataatagattcatctcaa

SEQ ID NO: 1446 - DNA, 51 bp, Artificial Sequence
  source: /note="Description of Artificial Sequence: Synthetic oligonucleotide"
ggcgcgccttgacataaagtctaacctataggatacttacagccatacaag

SEQ ID NO: 1447 - DNA, 9687 bp, Escherichia coli; identical to SEQ ID NO: 1432
